United States Patent Application Publication US 2019/0290729 A1 - sequence listing, part 7

SEQ ID NO: 96387 - protein, 27 aa, Artificial Sequence
  Cyclic GFR-binding peptide
EPLPIVYYVGRKPKVEQLSNDKGVVTY

SEQ ID NO: 96388 - protein, 27 aa, Artificial Sequence
  Cyclic GFR-binding peptide
EPLPIVYYDSANNVVEQLSNDKGVVTY

SEQ ID NO: 96389 - protein, 27 aa, Artificial Sequence
  Cyclic GFR-binding peptide
EPLTILYYVGRTPKVEQLSNDKGVVTY

SEQ ID NO: 96390 - protein, 27 aa, Artificial Sequence
  Cyclic GFR-binding peptide
SPISILFIIGKTPKIYKQYEDKGVVTY

SEQ ID NO: 96391 - protein, 27 aa, Artificial Sequence
  Cyclic GFR-binding peptide
SPISILFIDSANNVVYKQYEDKGVVTY

SEQ ID NO: 96392 - protein, 27 aa, Artificial Sequence
  Cyclic GFR-binding peptide
EPLPVVYYDDSSNVIEQLSNDKGVVTY

SEQ ID NO: 96393 - protein, 27 aa, Artificial Sequence
  Cyclic GFR-binding peptide
EPLPMVYYDEYDKVVEQLSNDKGVVTY

SEQ ID NO: 96394 - protein, 27 aa, Artificial Sequence
  Cyclic GFR-binding peptide
SPISMLFIDENEKVVYKQYEDKGVVTY

SEQ ID NO: 96395 - protein, 27 aa, Artificial Sequence
  Cyclic GFR-binding peptide
EPLPMVYYDENEKVVEQLSNDKGVVTY

SEQ ID NO: 96396 - protein, 27 aa, Artificial Sequence
  Cyclic GFR-binding peptide
SPISMLFIDEYDKVVYKQYEDKGVVTY

SEQ ID NO: 96397 - protein, 27 aa, Artificial Sequence
  Cyclic GFR-binding peptide
SAISILYLDSANNVVLKNYQDKGVVTY

SEQ ID NO: 96398 - protein, 27 aa, Artificial Sequence
  Cyclic GFR-binding peptide
EPLTILYYIGKTPKIEQLSNDKGVVTY

SEQ ID NO: 96399 - protein, 27 aa, Artificial Sequence
  Cyclic GFR-binding peptide
SPISILFIVGRKPKVYKQYEDKGVVTY

SEQ ID NO: 96400 - protein, 27 aa, Artificial Sequence
  Cyclic GFR-binding peptide
NAISILYFDSANNVVLKKYRDKGVVTY

SEQ ID NO: 96401 - protein, 27 aa, Artificial Sequence
  Cyclic GFR-binding peptide
EPLTVLYYDDSSNVIEQLSNDKGVVTY

SEQ ID NO: 96402 - protein, 29 aa, Artificial Sequence
  Cyclic GFR-binding peptide
DKGVVTYVTAKKLKPKKRVYEIKRVQVPR

SEQ ID NO: 96403 - protein, 29 aa, Artificial Sequence
  Cyclic GFR-binding peptide
DKGVVTYVQVEKLKPKKRVYEVKAVKVSR

SEQ ID NO: 96404 - protein, 29 aa, Artificial Sequence
  Cyclic GFR-binding peptide
DKGVVTYVQVEKFIPKKRVIEVKAVKVSR

SEQ ID NO: 96405 - protein, 29 aa, Artificial Sequence
  Cyclic GFR-binding peptide
DKGVVTYVQVEKHQGQHPKIRVKAMKVSR

SEQ ID NO: 96406 - protein, 29 aa, Artificial Sequence
  Cyclic GFR-binding peptide
DKGVVTYVTAKKHQGQHPKIRIKRMQVPR

SEQ ID NO: 96407 - protein, 29 aa, Artificial Sequence
  Cyclic GFR-binding peptide
DKGVVTYSMEGLLKPKKRVYEMIQVTINS

SEQ ID NO: 96408 - protein, 29 aa, Artificial Sequence
  Cyclic GFR-binding peptide
DKGVVTYSMEGIFIPKKRVIEMIQVTINS

SEQ ID NO: 96409 - protein, 29 aa, Artificial Sequence
  Cyclic GFR-binding peptide
DKGVVTYSMEGLHQGQHPKIRMIQMTINS

SEQ ID NO: 96410 - protein, 29 aa, Artificial Sequence
  Cyclic GFR-binding peptide
DKGVVTYSMEGILKPKKRVYEMIQVTINS

SEQ ID NO: 96411 - protein, 29 aa, Artificial Sequence
  Cyclic GFR-binding peptide
DKGVVTYSMEGLFIPKKRVIEMIQVTINS

SEQ ID NO: 96412 - protein, 29 aa, Artificial Sequence
  Cyclic GFR-binding peptide
DKGVVTYVTAKKFIPKKRVIEIKRVQVPR

SEQ ID NO: 96413 - protein, 29 aa, Artificial Sequence
  Cyclic GFR-binding peptide
DKGVVTYSMEGIHQGQHPKIRMIQMTINS

SEQ ID NO: 96414 - protein, 29 aa, Artificial Sequence
  Cyclic GFR-binding peptide
RPVQVRKIEYVRKKPKLKKATVDKGVVTY

SEQ ID NO: 96415 - protein, 29 aa, Artificial Sequence
  Cyclic GFR-binding peptide
RSVKVAKVEYVRKKPKLKEVQVDKGVVTY

SEQ ID NO: 96416 - protein, 29 aa, Artificial Sequence
  Cyclic GFR-binding peptide
RSVKVAKVEIVRKKPIFKEVQVDKGVVTY

SEQ ID NO: 96417 - protein, 29 aa, Artificial Sequence
  Cyclic GFR-binding peptide
RSVKMAKVRIKPHQGQHKEVQVDKGVVTY

SEQ ID NO: 96418 - protein, 29 aa, Artificial Sequence
  Cyclic GFR-binding peptide
RPVQMRKIRIKPHQGQHKKATVDKGVVTY

SEQ ID NO: 96419 - protein, 29 aa, Artificial Sequence
  Cyclic GFR-binding peptide
SNITVQIMEYVRKKPKLLGEMSDKGVVTY

SEQ ID NO: 96420 - protein, 29 aa, Artificial Sequence
  Cyclic GFR-binding peptide
SNITVQIMEIVRKKPIFIGEMSDKGVVTY

SEQ ID NO: 96421 - protein, 29 aa, Artificial Sequence
  Cyclic GFR-binding peptide
SNITMQIMRIKPHQGQHLGEMSDKGVVTY

SEQ ID NO: 96422 - protein, 29 aa, Artificial Sequence
  Cyclic GFR-binding peptide
SNITVQIMEYVRKKPKLIGEMSDKGVVTY

SEQ ID NO: 96423 - protein, 29 aa, Artificial Sequence
  Cyclic GFR-binding peptide
SNITVQIMEIVRKKPIFLGEMSDKGVVTY

SEQ ID NO: 96424 - protein, 29 aa, Artificial Sequence
  Cyclic GFR-binding peptide
RPVQVRKIEIVRKKPIFKKATVDKGVVTY

SEQ ID NO: 96425 - protein, 29 aa, Artificial Sequence
  Cyclic GFR-binding peptide
SNITMQIMRIKPHQGQHIGEMSDKGVVTY

SEQ ID NO: 96426 - protein, 27 aa, Artificial Sequence
  Cyclic GFR-binding peptide
DKGVVTYEYKFKVKPTRGVLYLISIPE

SEQ ID NO: 96427 - protein, 27 aa, Artificial Sequence
  Cyclic GFR-binding peptide
DKGVVTYEYKFKTPVGMDDLYLVSIPE

SEQ ID NO: 96428 - protein, 27 aa, Artificial Sequence
  Cyclic GFR-binding peptide
DKGVVTYEYQKYVKPKRGVIYLISIPS

SEQ ID NO: 96429 - protein, 27 aa, Artificial Sequence
  Cyclic GFR-binding peptide
DKGVVTYEYQKYVVKDYEDIYLMSIPS

SEQ ID NO: 96430 - protein, 27 aa, Artificial Sequence
  Cyclic GFR-binding peptide
DKGVVTYEYKFKIKPTKGILYLISIPE

SEQ ID NO: 96431 - protein, 27 aa, Artificial Sequence
  Cyclic GFR-binding peptide
DKGVVTYYHYKLYTVVGKDKYLISIPS

SEQ ID NO: 96432 - protein, 27 aa, Artificial Sequence
  Cyclic GFR-binding peptide
DKGVVTYRYKKLYTVVGKDFYLISIAN

SEQ ID NO: 96433 - protein, 27 aa, Artificial Sequence
  Cyclic GFR-binding peptide
DKGVVTYEYQKYVVNNAADIYLISIPS

SEQ ID NO: 96434 - protein, 27 aa, Artificial Sequence
  Cyclic GFR-binding peptide
DKGVVTYEYQKYVKPTRGVIYLISIPS

SEQ ID NO: 96435 - protein, 27 aa, Artificial Sequence
  Cyclic GFR-binding peptide
DKGVVTYEYQKYTPVGMDDIYLVSIPS

SEQ ID NO: 96436 - protein, 27 aa, Artificial Sequence
  Cyclic GFR-binding peptide
DKGVVTYEYKFKVVKDYEDLYLMSIPE

SEQ ID NO: 96437 - protein, 27 aa, Artificial Sequence
  Cyclic GFR-binding peptide
DKGVVTYEYKFKVVNNAADLYLISIPE

SEQ ID NO: 96438 - protein, 27 aa, Artificial Sequence
  Cyclic GFR-binding peptide
DKGVVTYEYQKYVVKENEDIYLMSIPS

SEQ ID NO: 96439 - protein, 27 aa, Artificial Sequence
  Cyclic GFR-binding peptide
DKGVVTYEYQKYIKPTKGIIYLISIPS

SEQ ID NO: 96440 - protein, 27 aa, Artificial Sequence
  Cyclic GFR-binding peptide
DKGVVTYRYKKLVVNNAADFYLISIAN

SEQ ID NO: 96441 - protein, 27 aa, Artificial Sequence
  Cyclic GFR-binding peptide
DKGVVTYYHYKLVVNNAADKYLISIPS

SEQ ID NO: 96442 - protein, 27 aa, Artificial Sequence
  Cyclic GFR-binding peptide
DKGVVTYEYKFKIVNNSSDLYLVSIPE

SEQ ID NO: 96443 - protein, 27 aa, Artificial Sequence
  Cyclic GFR-binding peptide
DKGVVTYEYQKYIVNSSDDIYLVSIPS

SEQ ID NO: 96444 - protein, 27 aa, Artificial Sequence
  Cyclic GFR-binding peptide
DKGVVTYEYKFKIVNSSDDLYLVSIPE

SEQ ID NO: 96445 - protein, 27 aa, Artificial Sequence
  Cyclic GFR-binding peptide
DKGVVTYEYKFKVKPKRGVLYLISIPE

SEQ ID NO: 96446 - protein, 27 aa, Artificial Sequence
  Cyclic GFR-binding peptide
DKGVVTYEYQKYYTVVGKDIYLISIPS

SEQ ID NO: 96447 - protein, 27 aa, Artificial Sequence
  Cyclic GFR-binding peptide
DKGVVTYEYKFKVVKENEDLYLMSIPE

SEQ ID NO: 96448 - protein, 27 aa, Artificial Sequence
  Cyclic GFR-binding peptide
DKGVVTYEYQKYIVNNSSDIYLVSIPS

SEQ ID NO: 96449 - protein, 27 aa, Artificial Sequence
  Cyclic GFR-binding peptide
DKGVVTYEYKFKYTVVGKDLYLISIPE

SEQ ID NO: 96450 - protein, 27 aa, Artificial Sequence
  Cyclic GFR-binding peptide
EPISILYLVGRTPKVKFKYEDKGVVTY

SEQ ID NO: 96451 - protein, 27 aa, Artificial Sequence
  Cyclic GFR-binding peptide
EPISVLYLDDMGVPTKFKYEDKGVVTY

SEQ ID NO: 96452 - protein, 27 aa, Artificial Sequence
  Cyclic GFR-binding peptide
SPISILYIVGRKPKVYKQYEDKGVVTY

SEQ ID NO: 96453 - protein, 27 aa, Artificial Sequence
  Cyclic GFR-binding peptide
SPISMLYIDEYDKVVYKQYEDKGVVTY

SEQ ID NO: 96454 - protein, 27 aa, Artificial Sequence
  Cyclic GFR-binding peptide
EPISILYLIGKTPKIKFKYEDKGVVTY

SEQ ID NO: 96455 - protein, 27 aa, Artificial Sequence
  Cyclic GFR-binding peptide
SPISILYKDKGVVTYLKYHYDKGVVTY

SEQ ID NO: 96456 - protein, 27 aa, Artificial Sequence
  Cyclic GFR-binding peptide
NAISILYFDKGVVTYLKKYRDKGVVTY

SEQ ID NO: 96457 - protein, 27 aa, Artificial Sequence
  Cyclic GFR-binding peptide
SPISILYIDAANNVVYKQYEDKGVVTY

SEQ ID NO: 96458 - protein, 27 aa, Artificial Sequence
  Cyclic GFR-binding peptide
SPISILYIVGRTPKVYKQYEDKGVVTY

SEQ ID NO: 96459 - protein, 27 aa, Artificial Sequence
  Cyclic GFR-binding peptide
SPISVLYIDDMGVPTYKQYEDKGVVTY

SEQ ID NO: 96460 - protein, 27 aa, Artificial Sequence
  Cyclic GFR-binding peptide
EPISMLYLDEYDKVVKFKYEDKGVVTY

SEQ ID NO: 96461 - protein, 27 aa, Artificial Sequence
  Cyclic GFR-binding peptide
EPISILYLDAANNVVKFKYEDKGVVTY

SEQ ID NO: 96462 - protein, 27 aa, Artificial Sequence
  Cyclic GFR-binding peptide
SPISMLYIDENEKVVYKQYEDKGVVTY

SEQ ID NO: 96463 - protein, 27 aa, Artificial Sequence
  Cyclic GFR-binding peptide
SPISILYIIGKTPKIYKQYEDKGVVTY

SEQ ID NO: 96464 - protein, 27 aa, Artificial Sequence
  Cyclic GFR-binding peptide
NAISILYFDAANNVVLKKYRDKGVVTY

SEQ ID NO: 96465 - protein, 27 aa, Artificial Sequence
  Cyclic GFR-binding peptide
SPISILYKDAANNVVLKYHYDKGVVTY

SEQ ID NO: 96466 - protein, 27 aa, Artificial Sequence
  Cyclic GFR-binding peptide
EPISVLYLDSSNNVIKFKYEDKGVVTY

SEQ ID NO: 96467 - protein, 27 aa, Artificial Sequence
  Cyclic GFR-binding peptide
SPISVLYIDDSSNVIYKQYEDKGVVTY

SEQ ID NO: 96468 - protein, 27 aa, Artificial Sequence
  Cyclic GFR-binding peptide
EPISVLYLDDSSNVIKFKYEDKGVVTY

SEQ ID NO: 96469 - protein, 27 aa, Artificial Sequence
  Cyclic GFR-binding peptide
EPISILYLVGRKPKVKFKYEDKGVVTY

SEQ ID NO: 96470 - protein, 27 aa, Artificial Sequence
  Cyclic GFR-binding peptide
SPISILYIDKGVVTYYKQYEDKGVVTY

SEQ ID NO: 96471 - protein, 27 aa, Artificial Sequence
  Cyclic GFR-binding peptide
EPISMLYLDENEKVVKFKYEDKGVVTY

SEQ ID NO: 96472 - protein, 27 aa, Artificial Sequence
  Cyclic GFR-binding peptide
SPISVLYIDSSNNVIYKQYEDKGVVTY

SEQ ID NO: 96473 - protein, 27 aa, Artificial Sequence
  Cyclic GFR-binding peptide
EPISILYLDKGVVTYKFKYEDKGVVTY

SEQ ID NO: 96474 - protein, 27 aa, Artificial Sequence
  Cyclic GFR-binding peptide
DKGVVTYPIKGYIIQQKDNFYLMNIPS

SEQ ID NO: 96475 - protein, 27 aa, Artificial Sequence
  Cyclic GFR-binding peptide
DKGVVTYPIKGYVVKDYEDFYLMNIPS

SEQ ID NO: 96476 - protein, 27 aa, Artificial Sequence
  Cyclic GFR-binding peptide
DKGVVTYPIKGYIVNSSDDFYLVNIPS

SEQ ID NO: 96477 - protein, 27 aa, Artificial Sequence
  Cyclic GFR-binding peptide
DKGVVTYPIKGYVVNNAADFYLINIPS

SEQ ID NO: 96478 - protein, 27 aa, Artificial Sequence
  Cyclic GFR-binding peptide
DKGVVTYPIKGYYTVVGKDFYLINIPS

SEQ ID NO: 96479 - protein, 27 aa, Artificial Sequence
  Cyclic GFR-binding peptide
DKGVVTYPIKGYLLVRGNDFYLMNIPS

SEQ ID NO: 96480 - protein, 27 aa, Artificial Sequence
  Cyclic GFR-binding peptide
DKGVVTYPIKGYVVKENEDFYLMNIPS

SEQ ID NO: 96481 - protein, 27 aa, Artificial Sequence
  Cyclic GFR-binding peptide
DKGVVTYPIKGYVVNNASDFYLINIPS

SEQ ID NO: 96482 - protein, 27 aa, Artificial Sequence
  Cyclic GFR-binding peptide
DKGVVTYPIKGYTPVGMDDFYLVNIPS

SEQ ID NO: 96483 - protein, 27 aa, Artificial Sequence
  Cyclic GFR-binding peptide
DKGVVTYPIKGYIVNNSSDFYLVNIPS

SEQ ID NO: 96484 - protein, 27 aa, Artificial Sequence
  Cyclic GFR-binding peptide
SPINMLYFNDKQQIIYGKIPDKGVVTY

SEQ ID NO: 96485 - protein, 27 aa, Artificial Sequence
  Cyclic GFR-binding peptide
SPINMLYFDEYDKVVYGKIPDKGVVTY

SEQ ID NO: 96486 - protein, 27 aa, Artificial Sequence
  Cyclic GFR-binding peptide
SPINVLYFDDSSNVIYGKIPDKGVVTY

SEQ ID NO: 96487 - protein, 27 aa, Artificial Sequence
  Cyclic GFR-binding peptide
SPINILYFDAANNVVYGKIPDKGVVTY

SEQ ID NO: 96488 - protein, 27 aa, Artificial Sequence
  Cyclic GFR-binding peptide
SPINILYFDKGVVTYYGKIPDKGVVTY

SEQ ID NO: 96489 - protein, 27 aa, Artificial Sequence
  Cyclic GFR-binding peptide
SPINMLYFDNGRVLLYGKIPDKGVVTY

SEQ ID NO: 96490 - protein, 27 aa, Artificial Sequence
  Cyclic GFR-binding peptide
SPINMLYFDENEKVVYGKIPDKGVVTY

SEQ ID NO: 96491 - protein, 27 aa, Artificial Sequence
  Cyclic GFR-binding peptide
SPINILYFDSANNVVYGKIPDKGVVTY

SEQ ID NO: 96492 - protein, 27 aa, Artificial Sequence
  Cyclic GFR-binding peptide
SPINVLYFDDMGVPTYGKIPDKGVVTY

SEQ ID NO: 96493 - protein, 27 aa, Artificial Sequence
  Cyclic GFR-binding peptide
SPINVLYFDSSNNVIYGKIPDKGVVTY

SEQ ID NO: 96494 - protein, 27 aa, Artificial Sequence
  Cyclic GFR-binding peptide
DKGVVTYEYQKYVVNNASDIYLISIPS

SEQ ID NO: 96495 - protein, 27 aa, Artificial Sequence
  Cyclic GFR-binding peptide
DKGVVTYEYQKYIIQQKDNIYLMSIPS

SEQ ID NO: 96496 - protein, 27 aa, Artificial Sequence
  Cyclic GFR-binding peptide
DKGVVTYEYQKYLLVRGNDIYLMSIPS

SEQ ID NO: 96497 - protein, 27 aa, Artificial Sequence
  Cyclic GFR-binding peptide
SPISILYIDSANNVVYKQYEDKGVVTY

SEQ ID NO: 96498 - protein, 27 aa, Artificial Sequence
  Cyclic GFR-binding peptide
SPISMLYINDKQQIIYKQYEDKGVVTY

SEQ ID NO: 96499 - protein, 27 aa, Artificial Sequence
  Cyclic GFR-binding peptide
SPISMLYIDNGRVLLYKQYEDKGVVTY

SEQ ID NO: 96500 - protein, 27 aa, Artificial Sequence
  Cyclic GFR-binding peptide
DKGVVTYPYVKLYTVVGKDFFLISLSS

SEQ ID NO: 96501 - protein, 27 aa, Artificial Sequence
  Cyclic GFR-binding peptide
DKGVVTYPYVKLIKPTKGIFFLISLSS

SEQ ID NO: 96502 - protein, 27 aa, Artificial Sequence
  Cyclic GFR-binding peptide
DKGVVTYPYVKLIIQQKDNFFLMSLSS

SEQ ID NO: 96503 - protein, 27 aa, Artificial Sequence
  Cyclic GFR-binding peptide
DKGVVTYPYVKLIVNSSDDFFLVSLSS

SEQ ID NO: 96504 - protein, 27 aa, Artificial Sequence
  Cyclic GFR-binding peptide
DKGVVTYPYVKLVKPKRGVFFLISLSS

SEQ ID NO: 96505 - protein, 27 aa, Artificial Sequence
  Cyclic GFR-binding peptide
DKGVVTYPYVKLVKPTRGVFFLISLSS

SEQ ID NO: 96506 - protein, 27 aa, Artificial Sequence
  Cyclic GFR-binding peptide
DKGVVTYPYVKLTPVGMDDFFLVSLSS

SEQ ID NO: 96507 - protein, 29 aa, Artificial Sequence
  Cyclic GFR-binding peptide
DKGVVTYPYVKLHQGQHPKIRFFLMSLSS

SEQ ID NO: 96508 - protein, 27 aa, Artificial Sequence
  Cyclic GFR-binding peptide
DKGVVTYPYVKLVVNKNEDFFLISLSS

SEQ ID NO: 96509 - protein, 27 aa, Artificial Sequence
  Cyclic GFR-binding peptide
DKGVVTYPYVKLVVNNASDFFLISLSS

SEQ ID NO: 96510 - protein, 27 aa, Artificial Sequence
  Cyclic GFR-binding peptide
DKGVVTYPYVKLVVKENEDFFLMSLSS

SEQ ID NO: 96511 - protein, 27 aa, Artificial Sequence
  Cyclic GFR-binding peptide
DKGVVTYPYVKLIVNNSSDFFLVSLSS

SEQ ID NO: 96512 - protein, 29 aa, Artificial Sequence
  Cyclic GFR-binding peptide
DKGVVTYPYVKLLKPKKRVYEFFLVSLSS

SEQ ID NO: 96513 - protein, 27 aa, Artificial Sequence
  Cyclic GFR-binding peptide
DKGVVTYPYVKLLLVRGNDFFLMSLSS

SEQ ID NO: 96514 - protein, 27 aa, Artificial Sequence
  Cyclic GFR-binding peptide
DKGVVTYPYVKLVVKDYEDFFLMSLSS

SEQ ID NO: 96515 - protein, 27 aa, Artificial Sequence
  Cyclic GFR-binding peptide
DKGVVTYPYVKLVVNNAADFFLISLSS

SEQ ID NO: 96516 - protein, 27 aa, Artificial Sequence
  Cyclic GFR-binding peptide
SSLSILFFDKGVVTYLKVYPDKGVVTY

SEQ ID NO: 96517 - protein, 27 aa, Artificial Sequence
  Cyclic GFR-binding peptide
SSLSILFFIGKTPKILKVYPDKGVVTY

SEQ ID NO: 96518 - protein, 27 aa, Artificial Sequence
  Cyclic GFR-binding peptide
SSLSMLFFNDKQQIILKVYPDKGVVTY

SEQ ID NO: 96519 - protein, 27 aa, Artificial Sequence
  Cyclic GFR-binding peptide
SSLSVLFFDDSSNVILKVYPDKGVVTY

SEQ ID NO: 96520 - protein, 27 aa, Artificial Sequence
  Cyclic GFR-binding peptide
SSLSILFFVGRKPKVLKVYPDKGVVTY

SEQ ID NO: 96521 - protein, 27 aa, Artificial Sequence
  Cyclic GFR-binding peptide
SSLSILFFVGRTPKVLKVYPDKGVVTY

SEQ ID NO: 96522 - protein, 27 aa, Artificial Sequence
  Cyclic GFR-binding peptide
SSLSVLFFDDMGVPTLKVYPDKGVVTY

SEQ ID NO: 96523 - protein, 29 aa, Artificial Sequence
  Cyclic GFR-binding peptide
SSLSMLFFRIKPHQGQHLKVYPDKGVVTY

SEQ ID NO: 96524 - protein, 27 aa, Artificial Sequence
  Cyclic GFR-binding peptide
SSLSILFFDENKNVVLKVYPDKGVVTY

SEQ ID NO: 96525 - protein, 27 aa, Artificial Sequence
  Cyclic GFR-binding peptide
SSLSILFFDSANNVVLKVYPDKGVVTY

SEQ ID NO: 96526 - protein, 27 aa, Artificial Sequence
  Cyclic GFR-binding peptide
SSLSMLFFDENEKVVLKVYPDKGVVTY

SEQ ID NO: 96527 - protein, 27 aa, Artificial Sequence
  Cyclic GFR-binding peptide
SSLSVLFFDSSNNVILKVYPDKGVVTY

SEQ ID NO: 96528 - protein, 29 aa, Artificial Sequence
  Cyclic GFR-binding peptide
SSLSVLFFEYVRKKPKLLKVYPDKGVVTY

SEQ ID NO: 96529 - protein, 27 aa, Artificial Sequence
  Cyclic GFR-binding peptide
SSLSMLFFDNGRVLLLKVYPDKGVVTY

SEQ ID NO: 96530 - protein, 27 aa, Artificial Sequence
  Cyclic GFR-binding peptide
SSLSMLFFDEYDKVVLKVYPDKGVVTY

SEQ ID NO: 96531 - protein, 27 aa, Artificial Sequence
  Cyclic GFR-binding peptide
SSLSILFFDAANNVVLKVYPDKGVVTY

SEQ ID NO: 96532 - protein, 27 aa, Artificial Sequence
  Cyclic GFR-binding peptide
DKGVVTYSMEGIIVNSSDDMIQVTINS

SEQ ID NO: 96533 - protein, 27 aa, Artificial Sequence
  Cyclic GFR-binding peptide
DKGVVTYVTAKKVVKENEDIKRMQVPR

SEQ ID NO: 96534 - protein, 27 aa, Artificial Sequence
  Cyclic GFR-binding peptide
DKGVVTYSMEGIVVKDYEDMIQMTINS

SEQ ID NO: 96535 - protein, 27 aa, Artificial Sequence
  Cyclic GFR-binding peptide
DKGVVTYVTAKKIKPTKGIIKRIQVPR

SEQ ID NO: 96536 - protein, 27 aa, Artificial Sequence
  Cyclic GFR-binding peptide
DKGVVTYSMEGIVKPTRGVMIQITINS

SEQ ID NO: 96537 - protein, 29 aa, Artificial Sequence
  Cyclic GFR-binding peptide
DKGVVTYNSLQEFIPKKRVIEYYVVPLPE

SEQ ID NO: 96538 - protein, 27 aa, Artificial Sequence
  Cyclic GFR-binding peptide
DKGVVTYVQVEKVKPKRGVVKAIKVSR

SEQ ID NO: 96539 - protein, 27 aa, Artificial Sequence
  Cyclic GFR-binding peptide
DKGVVTYVQVEKVVKENEDVKAMKVSR

SEQ ID NO: 96540 - protein, 27 aa, Artificial Sequence
  Cyclic GFR-binding peptide
DKGVVTYVTAKKIVNSSDDIKRVQVPR

SEQ ID NO: 96541 - protein, 27 aa, Artificial Sequence
  Cyclic GFR-binding peptide
DKGVVTYVQVEKIKPTKGIVKAIKVSR

SEQ ID NO: 96542 - protein, 29 aa, Artificial Sequence
  Cyclic GFR-binding peptide
DKGVVTYNSLQEFIPKKRVIEYYLVTLPE

SEQ ID NO: 96543 - protein, 27 aa, Artificial Sequence
  Cyclic GFR-binding peptide
DKGVVTYVQVEKIVNSSDDVKAVKVSR

SEQ ID NO: 96544 - protein, 27 aa, Artificial Sequence
  Cyclic GFR-binding peptide
DKGVVTYVTAKKVKPKRGVIKRIQVPR

SEQ ID NO: 96545 - protein, 27 aa, Artificial Sequence
  Cyclic GFR-binding peptide
DKGVVTYVQVEKVKPTRGVVKAIKVSR

SEQ ID NO: 96546 - protein, 27 aa, Artificial Sequence
  Cyclic GFR-binding peptide
DKGVVTYVTAKKVKPTRGVIKRIQVPR

SEQ ID NO: 96547 - protein, 29 aa, Artificial Sequence
  Cyclic GFR-binding peptide
DKGVVTYNSLQELKPKKRVYEYYLVTLPE

SEQ ID NO: 96548 - protein, 27 aa, Artificial Sequence
  Cyclic GFR-binding peptide
DKGVVTYSMEGIVKPKRGVMIQITINS

SEQ ID NO: 96549 - protein, 27 aa, Artificial Sequence
  Cyclic GFR-binding peptide
DKGVVTYSMEGIVVKENEDMIQMTINS

SEQ ID NO: 96550 - protein, 27 aa, Artificial Sequence
  Cyclic GFR-binding peptide
DKGVVTYSMEGIIKPTKGIMIQITINS

SEQ ID NO: 96551 - protein, 29 aa, Artificial Sequence
  Cyclic GFR-binding peptide
DKGVVTYNSLQEHQGQHPKIRYYLMTLPE

SEQ ID NO: 96552 - protein, 27 aa, Artificial Sequence
  Cyclic GFR-binding peptide
DKGVVTYVTAKKVVKDYEDIKRMQVPR

SEQ ID NO: 96553 - protein, 29 aa, Artificial Sequence
  Cyclic GFR-binding peptide
DKGVVTYNSLQEHQGQHPKIRYYVMPLPE

SEQ ID NO: 96554 - protein, 29 aa, Artificial Sequence
  Cyclic GFR-binding peptide
DKGVVTYNSLQELKPKKRVYEYYVVPLPE

SEQ ID NO: 96555 - protein, 27 aa, Artificial Sequence
  Cyclic GFR-binding peptide
DKGVVTYVQVEKVVKDYEDVKAMKVSR

SEQ ID NO: 96556 - protein, 27 aa, Artificial Sequence
  Cyclic GFR-binding peptide
SNITVQIMDDSSNVIIGEMSDKGVVTY

SEQ ID NO: 96557 - protein, 27 aa, Artificial Sequence
  Cyclic GFR-binding peptide
RPVQMRKIDENEKVVKKATVDKGVVTY

SEQ ID NO: 96558 - protein, 27 aa, Artificial Sequence
  Cyclic GFR-binding peptide
SNITMQIMDEYDKVVIGEMSDKGVVTY

SEQ ID NO: 96559 - protein, 27 aa, Artificial Sequence
  Cyclic GFR-binding peptide
RPVQIRKIIGKTPKIKKATVDKGVVTY

SEQ ID NO: 96560 - protein, 27 aa, Artificial Sequence
  Cyclic GFR-binding peptide
SNITIQIMVGRTPKVIGEMSDKGVVTY

SEQ ID NO: 96561 - protein, 29 aa, Artificial Sequence
  Cyclic GFR-binding peptide
EPLPVVYYEIVRKKPIFEQLSNDKGVVTY

SEQ ID NO: 96562 - protein, 27 aa, Artificial Sequence
  Cyclic GFR-binding peptide
RSVKIAKVVGRKPKVKEVQVDKGVVTY

SEQ ID NO: 96563 - protein, 27 aa, Artificial Sequence
  Cyclic GFR-binding peptide
RSVKMAKVDENEKVVKEVQVDKGVVTY

SEQ ID NO: 96564 - protein, 27 aa, Artificial Sequence
  Cyclic GFR-binding peptide
RPVQVRKIDDSSNVIKKATVDKGVVTY

SEQ ID NO: 96565 - protein, 27 aa, Artificial Sequence
  Cyclic GFR-binding peptide
RSVKIAKVIGKTPKIKEVQVDKGVVTY

SEQ ID NO: 96566 - protein, 29 aa, Artificial Sequence
  Cyclic GFR-binding peptide
EPLTVLYYEIVRKKPIFEQLSNDKGVVTY

SEQ ID NO: 96567 - protein, 27 aa, Artificial Sequence
  Cyclic GFR-binding peptide
RSVKVAKVDDSSNVIKEVQVDKGVVTY

SEQ ID NO: 96568 - protein, 27 aa, Artificial Sequence
  Cyclic GFR-binding peptide
RPVQIRKIVGRKPKVKKATVDKGVVTY

SEQ ID NO: 96569 - protein, 27 aa, Artificial Sequence
  Cyclic GFR-binding peptide
RSVKIAKVVGRTPKVKEVQVDKGVVTY

SEQ ID NO: 96570 - protein, 27 aa, Artificial Sequence
  Cyclic GFR-binding peptide
RPVQIRKIVGRTPKVKKATVDKGVVTY

SEQ ID NO: 96571 - protein, 29 aa, Artificial Sequence
  Cyclic GFR-binding peptide
EPLTVLYYEYVRKKPKLEQLSNDKGVVTY

SEQ ID NO: 96572 - protein, 27 aa, Artificial Sequence
  Cyclic GFR-binding peptide
SNITIQIMVGRKPKVIGEMSDKGVVTY

SEQ ID NO: 96573 - protein, 27 aa, Artificial Sequence
  Cyclic GFR-binding peptide
SNITMQIMDENEKVVIGEMSDKGVVTY

SEQ ID NO: 96574 - protein, 27 aa, Artificial Sequence
  Cyclic GFR-binding peptide
SNITIQIMIGKTPKIIGEMSDKGVVTY

SEQ ID NO: 96575 - protein, 29 aa, Artificial Sequence
  Cyclic GFR-binding peptide
EPLTMLYYRIKPHQGQHEQLSNDKGVVTY

SEQ ID NO: 96576 - protein, 27 aa, Artificial Sequence
  Cyclic GFR-binding peptide
RPVQMRKIDEYDKVVKKATVDKGVVTY

SEQ ID NO: 96577 - protein, 29 aa, Artificial Sequence
  Cyclic GFR-binding peptide
EPLPMVYYRIKPHQGQHEQLSNDKGVVTY

SEQ ID NO: 96578 - protein, 29 aa, Artificial Sequence
  Cyclic GFR-binding peptide
EPLPVVYYEYVRKKPKLEQLSNDKGVVTY

SEQ ID NO: 96579 - protein, 27 aa, Artificial Sequence
  Cyclic GFR-binding peptide
RSVKMAKVDEYDKVVKEVQVDKGVVTY

SEQ ID NO: 96580 - protein, 27 aa, Artificial Sequence
  Cyclic GFR-binding peptide
DKGVVTYRYKKLIIQQKDNFYLMSIAN

SEQ ID NO: 96581 - protein, 27 aa, Artificial Sequence
  Cyclic GFR-binding peptide
DKGVVTYRYKKLLLVRGNDFYLMSIAN

SEQ ID NO: 96582 - protein, 27 aa, Artificial Sequence
  Cyclic GFR-binding peptide
NAISMLYFNDKQQIILKKYRDKGVVTY

SEQ ID NO: 96583 - protein, 27 aa, Artificial Sequence
  Cyclic GFR-binding peptide
NAISMLYFDNGRVLLLKKYRDKGVVTY

SEQ ID NO: 96584 - protein, 27 aa, Artificial Sequence
  Cyclic GFR-binding peptide
DKGVVTYEYKFKVVNKNEDLYLISIPE

SEQ ID NO: 96585 - protein, 27 aa, Artificial Sequence
  Cyclic GFR-binding peptide
DKGVVTYPIKGYVKPTRGVFYLINIPS

SEQ ID NO: 96586 - protein, 27 aa, Artificial Sequence
  Cyclic GFR-binding peptide
DKGVVTYEYKFKLLVRGNDLYLMSIPE

SEQ ID NO: 96587 - protein, 27 aa, Artificial Sequence
  Cyclic GFR-binding peptide
DKGVVTYYHYKLVVNKNEDKYLISIPS

SEQ ID NO: 96588 - protein, 27 aa, Artificial Sequence
  Cyclic GFR-binding peptide
DKGVVTYRHKRLLLVRGNDYYLMSTAS

SEQ ID NO: 96589 - protein, 27 aa, Artificial Sequence
  Cyclic GFR-binding peptide
DKGVVTYYHYKLLLVRGNDKYLMSIPS

SEQ ID NO: 96590 - protein, 27 aa, Artificial Sequence
  Cyclic GFR-binding peptide
DKGVVTYRHKRLVVNKNEDYYLISTAS

SEQ ID NO: 96591 - protein, 27 aa, Artificial Sequence
  Cyclic GFR-binding peptide
DKGVVTYRYKKLVVNKNEDFYLISIAN

SEQ ID NO: 96592 - protein, 27 aa, Artificial Sequence
  Cyclic GFR-binding peptide
DKGVVTYPIKGYVVNKNEDFYLINIPS

SEQ ID NO: 96593 - protein, 27 aa, Artificial Sequence
  Cyclic GFR-binding peptide
DKGVVTYPIKGYIKPTKGIFYLINIPS

SEQ ID NO: 96594 - protein, 27 aa, Artificial Sequence
  Cyclic GFR-binding peptide
DKGVVTYRHKRLYTVVGKDYYLISTAS

SEQ ID NO: 96595 - protein, 27 aa, Artificial Sequence
  Cyclic GFR-binding peptide
DKGVVTYEYKFKVVNNASDLYLISIPE

SEQ ID NO: 96596 - protein, 27 aa, Artificial Sequence
  Cyclic GFR-binding peptide
DKGVVTYRHKRLIIQQKDNYYLMSTAS

SEQ ID NO: 96597 - protein, 27 aa, Artificial Sequence
  Cyclic GFR-binding peptide
DKGVVTYEYKFKIIQQKDNLYLMSIPE

SEQ ID NO: 96598 - protein, 27 aa, Artificial Sequence
  Cyclic GFR-binding peptide
DKGVVTYPIKGYVKPKRGVFYLINIPS

SEQ ID NO: 96599 - protein, 27 aa, Artificial Sequence
  Cyclic GFR-binding peptide
DKGVVTYRHKRLVVNNASDYYLISTAS

SEQ ID NO: 96600 - protein, 27 aa, Artificial Sequence
  Cyclic GFR-binding peptide
DKGVVTYYHYKLVVNNASDKYLISIPS

SEQ ID NO: 96601 - protein, 27 aa, Artificial Sequence
  Cyclic GFR-binding peptide
DKGVVTYYHYKLIIQQKDNKYLMSIPS

SEQ ID NO: 96602 - protein, 27 aa, Artificial Sequence
  Cyclic GFR-binding peptide
DKGVVTYRHKRLVVNNAADYYLISTAS

SEQ ID NO: 96603 - protein, 27 aa, Artificial Sequence
  Cyclic GFR-binding peptide
EPISILYLDENKNVVKFKYEDKGVVTY

SEQ ID NO: 96604 - protein, 27 aa, Artificial Sequence
  Cyclic GFR-binding peptide
SPINILYFVGRTPKVYGKIPDKGVVTY

SEQ ID NO: 96605 - protein, 27 aa, Artificial Sequence
  Cyclic GFR-binding peptide
EPISMLYLDNGRVLLKFKYEDKGVVTY

SEQ ID NO: 96606 - protein, 27 aa, Artificial Sequence
  Cyclic GFR-binding peptide
SPISILYKDENKNVVLKYHYDKGVVTY

SEQ ID NO: 96607 - protein, 27 aa, Artificial Sequence
  Cyclic GFR-binding peptide
SATSMLYYDNGRVLLLRKHRDKGVVTY

SEQ ID NO: 96608 - protein, 27 aa, Artificial Sequence
  Cyclic GFR-binding peptide
SPISMLYKDNGRVLLLKYHYDKGVVTY

SEQ ID NO: 96609 - protein, 27 aa, Artificial Sequence
  Cyclic GFR-binding peptide
SATSILYYDENKNVVLRKHRDKGVVTY

SEQ ID NO: 96610 - protein, 27 aa, Artificial Sequence
  Cyclic GFR-binding peptide
NAISILYFDENKNVVLKKYRDKGVVTY

SEQ ID NO: 96611 - protein, 27 aa, Artificial Sequence
  Cyclic GFR-binding peptide
SPINILYFDENKNVVYGKIPDKGVVTY

SEQ ID NO: 96612 - protein, 27 aa, Artificial Sequence
  Cyclic GFR-binding peptide
SPINILYFIGKTPKIYGKIPDKGVVTY

SEQ ID NO: 96613 - protein, 27 aa, Artificial Sequence
  Cyclic GFR-binding peptide
SATSILYYDKGVVTYLRKHRDKGVVTY

SEQ ID NO: 96614 - protein, 27 aa, Artificial Sequence
  Cyclic GFR-binding peptide
EPISILYLDSANNVVKFKYEDKGVVTY

SEQ ID NO: 96615 - protein, 27 aa, Artificial Sequence
  Cyclic GFR-binding peptide
SATSMLYYNDKQQIILRKHRDKGVVTY

SEQ ID NO: 96616 - protein, 27 aa, Artificial Sequence
  Cyclic GFR-binding peptide
EPISMLYLNDKQQIIKFKYEDKGVVTY

SEQ ID NO: 96617 - protein, 27 aa, Artificial Sequence
  Cyclic GFR-binding peptide
SPINILYFVGRKPKVYGKIPDKGVVTY

SEQ ID NO: 96618 - protein, 27 aa, Artificial Sequence
  Cyclic GFR-binding peptide
SATSILYYDSANNVVLRKHRDKGVVTY

SEQ ID NO: 96619 - protein, 27 aa, Artificial Sequence
  Cyclic GFR-binding peptide
SPISILYKDSANNVVLKYHYDKGVVTY

SEQ ID NO: 96620 - protein, 27 aa, Artificial Sequence
  Cyclic GFR-binding peptide
SPISMLYKNDKQQIILKYHYDKGVVTY

SEQ ID NO: 96621 - protein, 27 aa, Artificial Sequence
  Cyclic GFR-binding peptide
SATSILYYDAANNVVLRKHRDKGVVTY

SEQ ID NO: 96622 - protein, 27 aa, Artificial Sequence
  Cyclic GFR-binding peptide
DKGVVTYSMEGIIIQQKDNMIQMTINS

SEQ ID NO: 96623 - protein, 27 aa, Artificial Sequence
  Cyclic GFR-binding peptide
DKGVVTYSMEGLVKPKRGVMIQITINS

SEQ ID NO: 96624 - protein, 27 aa, Artificial Sequence
  Cyclic GFR-binding peptide
DKGVVTYSMEGLVVNNASDMIQITINS

SEQ ID NO: 96625 - protein, 27 aa, Artificial Sequence
  Cyclic GFR-binding peptide
DKGVVTYSMEGILLVRGNDMIQMTINS

SEQ ID NO: 96626 - protein, 27 aa, Artificial Sequence
  Cyclic GFR-binding peptide
DKGVVTYSMEGLIKPTKGIMIQITINS

SEQ ID NO: 96627 - protein, 27 aa, Artificial Sequence
  Cyclic GFR-binding peptide
DKGVVTYSMEGLIVNSSDDMIQVTINS

SEQ ID NO: 96628 - protein, 27 aa, Artificial Sequence
  Cyclic GFR-binding peptide
DKGVVTYSMEGIVVNNASDMIQITINS

SEQ ID NO: 96629 - protein, 27 aa, Artificial Sequence
  Cyclic GFR-binding peptide
DKGVVTYSMEGLVVNNAADMIQITINS

SEQ ID NO: 96630 - protein, 27 aa, Artificial Sequence
  Cyclic GFR-binding peptide
DKGVVTYSMEGLLLVRGNDMIQMTINS

SEQ ID NO: 96631 - protein, 27 aa, Artificial Sequence
  Cyclic GFR-binding peptide
DKGVVTYSMEGLIIQQKDNMIQMTINS

SEQ ID NO: 96632 - protein, 27 aa, Artificial Sequence
  Cyclic GFR-binding peptide
DKGVVTYSMEGIVVNNAADMIQITINS

SEQ ID NO: 96633 - protein, 27 aa, Artificial Sequence
  Cyclic GFR-binding peptide
DKGVVTYSMEGLVKPTRGVMIQITINS

SEQ ID NO: 96634 - protein, 27 aa, Artificial Sequence
  Cyclic GFR-binding peptide
SNITMQIMNDKQQIIIGEMSDKGVVTY

SEQ ID NO: 96635 - protein, 27 aa, Artificial Sequence
  Cyclic GFR-binding peptide
SNITIQIMVGRKPKVLGEMSDKGVVTY

SEQ ID NO: 96636 - protein, 27 aa, Artificial Sequence
  Cyclic GFR-binding peptide
SNITIQIMDSANNVVLGEMSDKGVVTY

SEQ ID NO: 96637 - protein, 27 aa, Artificial Sequence
  Cyclic GFR-binding peptide
SNITMQIMDNGRVLLIGEMSDKGVVTY

SEQ ID NO: 96638 - protein, 27 aa, Artificial Sequence
  Cyclic GFR-binding peptide
SNITIQIMIGKTPKILGEMSDKGVVTY

SEQ ID NO: 96639 - protein, 27 aa, Artificial Sequence
  Cyclic GFR-binding peptide
SNITVQIMDDSSNVILGEMSDKGVVTY

SEQ ID NO: 96640 - protein, 27 aa, Artificial Sequence
  Cyclic GFR-binding peptide
SNITIQIMDSANNVVIGEMSDKGVVTY

SEQ ID NO: 96641 - protein, 27 aa, Artificial Sequence
  Cyclic GFR-binding peptide
SNITIQIMDAANNVVLGEMSDKGVVTY

SEQ ID NO: 96642 - protein, 27 aa, Artificial Sequence
  Cyclic GFR-binding peptide
SNITMQIMDNGRVLLLGEMSDKGVVTY

SEQ ID NO: 96643 - protein, 27 aa, Artificial Sequence
  Cyclic GFR-binding peptide
SNITMQIMNDKQQIILGEMSDKGVVTY

SEQ ID NO: 96644 - protein, 27 aa, Artificial Sequence
  Cyclic GFR-binding peptide
SNITIQIMDAANNVVIGEMSDKGVVTY

SEQ ID NO: 96645 - protein, 27 aa, Artificial Sequence
  Cyclic GFR-binding peptide
SNITIQIMVGRTPKVLGEMSDKGVVTY

SEQ ID NO: 96646 - protein, 27 aa, Artificial Sequence
  Cyclic GFR-binding peptide
DKGVVTYQYNKLVVNKNEDLYLISIAS

SEQ ID NO: 96647 - protein, 27 aa, Artificial Sequence
  Cyclic GFR-binding peptide
DKGVVTYQYNKLVVNNAADLYLISIAS

SEQ ID NO: 96648 - protein, 27 aa, Artificial Sequence
  Cyclic GFR-binding peptide
DKGVVTYQYNKLIIQQKDNLYLMSIAS

SEQ ID NO: 96649 - protein, 27 aa, Artificial Sequence
  Cyclic GFR-binding peptide
DKGVVTYQYNKLLLVRGNDLYLMSIAS

SEQ ID NO: 96650 - protein, 27 aa, Artificial Sequence
  Cyclic GFR-binding peptide
DKGVVTYQYNKLYTVVGKDLYLISIAS

SEQ ID NO: 96651 - protein, 27 aa, Artificial Sequence
  Cyclic GFR-binding peptide
SAISILYLDENKNVVLKNYQDKGVVTY

SEQ ID NO: 96652 - protein, 27 aa, Artificial Sequence
  Cyclic GFR-binding peptide
SAISILYLDAANNVVLKNYQDKGVVTY

SEQ ID NO: 96653 - protein, 27 aa, Artificial Sequence
  Cyclic GFR-binding peptide
SAISMLYLNDKQQIILKNYQDKGVVTY

SEQ ID NO: 96654 - protein, 27 aa, Artificial Sequence
  Cyclic GFR-binding peptide
SAISMLYLDNGRVLLLKNYQDKGVVTY

SEQ ID NO: 96655 - protein, 27 aa, Artificial Sequence
  Cyclic GFR-binding peptide
SAISILYLDKGVVTYLKNYQDKGVVTY

SEQ ID NO: 96656 - protein, 27 aa, Artificial Sequence
  Cyclic GFR-binding peptide
NDKQQIIRYKKLIKPTKGIFYLISIAN

SEQ ID NO: 96657 - protein, 29 aa, Artificial Sequence
  Cyclic GFR-binding peptide
NDKQQIIRHKRLFIPKKRVIEYYLVSTAS

SEQ ID NO: 96658 - protein, 27 aa, Artificial Sequence
  Cyclic GFR-binding peptide
NDKQQIIYHYKLVVKDYEDKYLMSIPS

SEQ ID NO: 96659 - protein, 27 aa, Artificial Sequence
  Cyclic GFR-binding peptide
NDKQQIIQYNKLIVNNSSDLYLVSIAS

SEQ ID NO: 96660 - protein, 27 aa, Artificial Sequence
  Cyclic GFR-binding peptide
NDKQQIIRYKKLVVKDYEDFYLMSIAN

SEQ ID NO: 96661 - protein, 27 aa, Artificial Sequence
  Cyclic GFR-binding peptide
NDKQQIIRYKKLVKPTRGVFYLISIAN

SEQ ID NO: 96662 - protein, 27 aa, Artificial Sequence
  Cyclic GFR-binding peptide
NDKQQIIRHKRLVVKENEDYYLMSTAS

SEQ ID NO: 96663 - protein, 27 aa, Artificial Sequence
  Cyclic GFR-binding peptide
NDKQQIIYHYKLIKPTKGIKYLISIPS

SEQ ID NO: 96664 - protein, 29 aa, Artificial Sequence
  Cyclic GFR-binding peptide
NDKQQIIRYKKLFIPKKRVIEFYLVSIAN

SEQ ID NO: 96665 - protein, 27 aa, Artificial Sequence
  Cyclic GFR-binding peptide
NDKQQIIYHYKLVVKENEDKYLMSIPS

SEQ ID NO: 96666 - protein, 27 aa, Artificial Sequence
  Cyclic GFR-binding peptide
NDKQQIIRHKRLVKPKRGVYYLISTAS

SEQ ID NO: 96667 - protein, 27 aa, Artificial Sequence
  Cyclic GFR-binding peptide
NDKQQIIYHYKLVKPKRGVKYLISIPS

SEQ ID NO: 96668 - protein, 29 aa, Artificial Sequence
  Cyclic GFR-binding peptide
NDKQQIIQYNKLFIPKKRVIELYLVSIAS

SEQ ID NO: 96669 - protein, 27 aa, Artificial Sequence
  Cyclic GFR-binding peptide
NDKQQIIQYNKLVKPTRGVLYLISIAS

SEQ ID NO: 96670 - protein, 27 aa, Artificial Sequence
  Cyclic GFR-binding peptide
NDKQQIIRYKKLVVKENEDFYLMSIAN

SEQ ID NO: 96671 - protein, 27 aa, Artificial Sequence
  Cyclic GFR-binding peptide
NDKQQIIQYNKLTPVGMDDLYLVSIAS

SEQ ID NO: 96672 - protein, 27 aa, Artificial Sequence
  Cyclic GFR-binding peptide
NDKQQIIRYKKLTPVGMDDFYLVSIAN

SEQ ID NO: 96673 - protein, 27 aa, Artificial Sequence
  Cyclic GFR-binding peptide
NDKQQIIRYKKLVKPKRGVFYLISIAN

SEQ ID NO: 96674 - protein, 27 aa, Artificial Sequence
  Cyclic GFR-binding peptide
NDKQQIIQYNKLVVKENEDLYLMSIAS

SEQ ID NO: 96675 - protein, 27 aa, Artificial Sequence
  Cyclic GFR-binding peptide
NDKQQIIYHYKLIVNSSDDKYLVSIPS

SEQ ID NO: 96676 - protein, 27 aa, Artificial Sequence
  Cyclic GFR-binding peptide
NDKQQIIQYNKLVKPKRGVLYLISIAS

SEQ ID NO: 96677 - protein, 27 aa, Artificial Sequence
  Cyclic GFR-binding peptide
NDKQQIIRYKKLIVNNSSDFYLVSIAN

SEQ ID NO: 96678 - protein, 27 aa, Artificial Sequence
  Cyclic GFR-binding peptide
NDKQQIIRYKKLIVNSSDDFYLVSIAN

SEQ ID NO: 96679 - protein, 27 aa, Artificial Sequence
  Cyclic GFR-binding peptide
NDKQQIIRHKRLVKPTRGVYYLISTAS

SEQ ID NO: 96680 - protein, 29 aa, Artificial Sequence
  Cyclic GFR-binding peptide
NDKQQIIYHYKLFIPKKRVIEKYLVSIPS

SEQ ID NO: 96681 - protein, 27 aa, Artificial Sequence
  Cyclic GFR-binding peptide
NDKQQIIRHKRLIKPTKGIYYLISTAS

SEQ ID NO: 96682 - protein, 27 aa, Artificial Sequence
  Cyclic GFR-binding peptide
NDKQQIIRHKRLTPVGMDDYYLVSTAS

SEQ ID NO: 96683 - protein, 27 aa, Artificial Sequence
  Cyclic GFR-binding peptide
NDKQQIIYHYKLTPVGMDDKYLVSIPS

SEQ ID NO: 96684 - protein, 27 aa, Artificial Sequence
  Cyclic GFR-binding peptide
NDKQQIIYHYKLIVNNSSDKYLVSIPS

SEQ ID NO: 96685 - protein, 27 aa, Artificial Sequence
  Cyclic GFR-binding peptide
NDKQQIIRHKRLIVNNSSDYYLVSTAS

SEQ ID NO: 96686 - protein, 27 aa, Artificial Sequence
  Cyclic GFR-binding peptide
NDKQQIIYHYKLVKPTRGVKYLISIPS

SEQ ID NO: 96687 - protein, 27 aa, Artificial Sequence
  Cyclic GFR-binding peptide
NDKQQIIRHKRLIVNSSDDYYLVSTAS

SEQ ID NO: 96688 - protein, 27 aa, Artificial Sequence
  Cyclic GFR-binding peptide
NDKQQIIRHKRLVVKDYEDYYLMSTAS

SEQ ID NO: 96689 - protein, 27 aa, Artificial Sequence
  Cyclic GFR-binding peptide
NDKQQIIQYNKLIKPTKGILYLISIAS

SEQ ID NO: 96690 - protein, 27 aa, Artificial Sequence
  Cyclic GFR-binding peptide
NDKQQIIQYNKLVVKDYEDLYLMSIAS

SEQ ID NO: 96691 - protein, 27 aa, Artificial Sequence
  Cyclic GFR-binding peptide
NDKQQIIQYNKLIVNSSDDLYLVSIAS

SEQ ID NO: 96692 - protein, 27 aa, Artificial Sequence
  Cyclic GFR-binding peptide
NAISILYFIGKTPKILKKYRNDKQQII

SEQ ID NO: 96693 - protein, 29 aa, Artificial Sequence
  Cyclic GFR-binding peptide
SATSVLYYEIVRKKPIFLRKHRNDKQQII

SEQ ID NO: 96694 - protein, 27 aa, Artificial Sequence
  Cyclic GFR-binding peptide
SPISMLYKDEYDKVVLKYHYNDKQQII

SEQ ID NO: 96695 - protein, 27 aa, Artificial Sequence
  Cyclic GFR-binding peptide
SAISVLYLDSSNNVILKNYQNDKQQII

SEQ ID NO: 96696 - protein, 27 aa, Artificial Sequence
  Cyclic GFR-binding peptide
NAISMLYFDEYDKVVLKKYRNDKQQII

SEQ ID NO: 96697 - protein, 27 aa, Artificial Sequence
  Cyclic GFR-binding peptide
NAISILYFVGRTPKVLKKYRNDKQQII

SEQ ID NO: 96698 - protein, 27 aa, Artificial Sequence
  Cyclic GFR-binding peptide
SATSMLYYDENEKVVLRKHRNDKQQII

SEQ ID NO: 96699 - protein, 27 aa, Artificial Sequence
  Cyclic GFR-binding peptide
SPISILYKIGKTPKILKYHYNDKQQII

SEQ ID NO: 96700 - protein, 29 aa, Artificial Sequence
  Cyclic GFR-binding peptide
NAISVLYFEIVRKKPIFLKKYRNDKQQII

SEQ ID NO: 96701 - protein, 27 aa, Artificial Sequence
  Cyclic GFR-binding peptide
SPISMLYKDENEKVVLKYHYNDKQQII

SEQ ID NO: 96702 - protein, 27 aa, Artificial Sequence
  Cyclic GFR-binding peptide
SATSILYYVGRKPKVLRKHRNDKQQII

SEQ ID NO: 96703 - protein, 27 aa, Artificial Sequence
  Cyclic GFR-binding peptide
SPISILYKVGRKPKVLKYHYNDKQQII

SEQ ID NO: 96704 - protein, 29 aa, Artificial Sequence
  Cyclic GFR-binding peptide
SAISVLYLEIVRKKPIFLKNYQNDKQQII

SEQ ID NO: 96705 - protein, 27 aa, Artificial Sequence
  Cyclic GFR-binding peptide
SAISILYLVGRTPKVLKNYQNDKQQII

SEQ ID NO: 96706 - protein, 27 aa, Artificial Sequence
  Cyclic GFR-binding peptide
NAISMLYFDENEKVVLKKYRNDKQQII

SEQ ID NO: 96707 - protein, 27 aa, Artificial Sequence
  Cyclic GFR-binding peptide
SAISVLYLDDMGVPTLKNYQNDKQQII

SEQ ID NO: 96708 - protein, 27 aa, Artificial Sequence
  Cyclic GFR-binding peptide
NAISVLYFDDMGVPTLKKYRNDKQQII

SEQ ID NO: 96709 - protein, 27 aa, Artificial Sequence
  Cyclic GFR-binding peptide
NAISILYFVGRKPKVLKKYRNDKQQII

SEQ ID NO: 96710 - protein, 27 aa, Artificial Sequence
  Cyclic GFR-binding peptide
SAISMLYLDENEKVVLKNYQNDKQQII

SEQ ID NO: 96711 - protein, 27 aa, Artificial Sequence
  Cyclic GFR-binding peptide
SPISVLYKDDSSNVILKYHYNDKQQII

SEQ ID NO: 96712 - protein, 27 aa, Artificial Sequence
  Cyclic GFR-binding peptide
SAISILYLVGRKPKVLKNYQNDKQQII

SEQ ID NO: 96713 - protein, 27 aa, Artificial Sequence
  Cyclic GFR-binding peptide
NAISVLYFDSSNNVILKKYRNDKQQII

SEQ ID NO: 96714 - protein, 27 aa, Artificial Sequence
  Cyclic GFR-binding peptide
NAISVLYFDDSSNVILKKYRNDKQQII

SEQ ID NO: 96715 - protein, 27 aa, Artificial Sequence
  Cyclic GFR-binding peptide
SATSILYYVGRTPKVLRKHRNDKQQII

SEQ ID NO: 96716 - protein, 29 aa, Artificial Sequence
  Cyclic GFR-binding peptide
SPISVLYKEIVRKKPIFLKYHYNDKQQII

SEQ ID NO: 96717 - protein, 27 aa, Artificial Sequence
  Cyclic GFR-binding peptide
SATSILYYIGKTPKILRKHRNDKQQII

SEQ ID NO: 96718 - protein, 27 aa, Artificial Sequence
  Cyclic GFR-binding peptide
SATSVLYYDDMGVPTLRKHRNDKQQII

SEQ ID NO: 96719 - protein, 27 aa, Artificial Sequence
  Cyclic GFR-binding peptide
SPISVLYKDDMGVPTLKYHYNDKQQII

SEQ ID NO: 96720 - protein, 27 aa, Artificial Sequence
  Cyclic GFR-binding peptide
SPISVLYKDSSNNVILKYHYNDKQQII

SEQ ID NO: 96721 - protein, 27 aa, Artificial Sequence
  Cyclic GFR-binding peptide
SATSVLYYDSSNNVILRKHRNDKQQII

SEQ ID NO: 96722 - protein, 27 aa, Artificial Sequence
  Cyclic GFR-binding peptide
SPISILYKVGRTPKVLKYHYNDKQQII

SEQ ID NO: 96723 - protein, 27 aa, Artificial Sequence
  Cyclic GFR-binding peptide
SATSVLYYDDSSNVILRKHRNDKQQII

SEQ ID NO: 96724 - protein, 27 aa, Artificial Sequence
  Cyclic GFR-binding peptide
SATSMLYYDEYDKVVLRKHRNDKQQII

SEQ ID NO: 96725 - protein, 27 aa, Artificial Sequence
  Cyclic GFR-binding peptide
SAISILYLIGKTPKILKNYQNDKQQII

SEQ ID NO: 96726 - protein, 27 aa, Artificial Sequence
  Cyclic GFR-binding peptide
SAISMLYLDEYDKVVLKNYQNDKQQII

SEQ ID NO: 96727 - protein, 27 aa, Artificial Sequence
  Cyclic GFR-binding peptide
SAISVLYLDDSSNVILKNYQNDKQQII

SEQ ID NO: 96728 - protein, 27 aa, Artificial Sequence
  Cyclic GFR-binding peptide
NDKQQIINSLQEVVKDYEDYYLMTLPE

SEQ ID NO: 96729 - protein, 27 aa, Artificial Sequence
  Cyclic GFR-binding peptide
NDKQQIINSLQEIKPTKGIYYVIPLPE

SEQ ID NO: 96730 - protein, 27 aa, Artificial Sequence
  Cyclic GFR-binding peptide
NDKQQIINSLQEVKPKRGVYYLITLPE

SEQ ID NO: 96731 - protein, 27 aa, Artificial Sequence
  Cyclic GFR-binding peptide
NDKQQIINSLQEVKPTRGVYYVIPLPE

SEQ ID NO: 96732 - protein, 27 aa, Artificial Sequence
  Cyclic GFR-binding peptide
NDKQQIIEYQKYIVNSSDDIFLVSIPS

SEQ ID NO: 96733 - protein, 27 aa, Artificial Sequence
  Cyclic GFR-binding peptide
NDKQQIIEYQKYVKPTRGVIFLISIPS

SEQ ID NO: 96734 - protein, 27 aa, Artificial Sequence
  Cyclic GFR-binding peptide
NDKQQIINSLQEVVKENEDYYLMTLPE

SEQ ID NO: 96735 - protein, 27 aa, Artificial Sequence
  Cyclic GFR-binding peptide
NDKQQIINSLQEVVNNASDYYLITLPE

SEQ ID NO: 96736 - protein, 27 aa, Artificial Sequence
  Cyclic GFR-binding peptide
NDKQQIINSLQEVKPKRGVYYVIPLPE

SEQ ID NO: 96737 - protein, 27 aa, Artificial Sequence
  Cyclic GFR-binding peptide
NDKQQIINSLQEVVNNASDYYVIPLPE

SEQ ID NO: 96738 - protein, 27 aa, Artificial Sequence
  Cyclic GFR-binding peptide
NDKQQIINSLQEVKPTRGVYYLITLPE

SEQ ID NO: 96739 - protein, 27 aa, Artificial Sequence
  Cyclic GFR-binding peptide
NDKQQIIEYQKYIKPTKGIIFLISIPS

SEQ ID NO: 96740 - protein, 27 aa, Artificial Sequence
  Cyclic GFR-binding peptide
NDKQQIIEYQKYVVNNASDIFLISIPS

SEQ ID NO: 96741 - protein, 27 aa, Artificial Sequence
  Cyclic GFR-binding peptide
NDKQQIINSLQEIVNSSDDYYVVPLPE

SEQ ID NO: 96742 - protein, 27 aa, Artificial Sequence
  Cyclic GFR-binding peptide
NDKQQIINSLQEVVKDYEDYYVMPLPE

SEQ ID NO: 96743 - protein, 27 aa, Artificial Sequence
  Cyclic GFR-binding peptide
NDKQQIIEYQKYVVKENEDIFLMSIPS

SEQ ID NO: 96744 - protein, 27 aa, Artificial Sequence
  Cyclic GFR-binding peptide
NDKQQIINSLQEVVKENEDYYVMPLPE

SEQ ID NO: 96745 - protein, 27 aa, Artificial Sequence
  Cyclic GFR-binding peptide
NDKQQIIEYQKYVVKDYEDIFLMSIPS

SEQ ID NO: 96746 - protein, 27 aa, Artificial Sequence
  Cyclic GFR-binding peptide
NDKQQIIQYNKLVVNNASDLYLISIAS

SEQ ID NO: 96747 - protein, 27 aa, Artificial Sequence
  Cyclic GFR-binding peptide
NDKQQIINSLQEIKPTKGIYYLITLPE

SEQ ID NO: 96748 - protein, 27 aa, Artificial Sequence
  Cyclic GFR-binding peptide
NDKQQIIEYQKYVKPKRGVIFLISIPS

SEQ ID NO: 96749 - protein, 27 aa, Artificial Sequence
  Cyclic GFR-binding peptide
NDKQQIIRYKKLVVNNASDFYLISIAN

SEQ ID NO: 96750 - protein, 27 aa, Artificial Sequence
  Cyclic GFR-binding peptide
NDKQQIINSLQEIVNSSDDYYLVTLPE

SEQ ID NO: 96751 - protein, 27 aa, Artificial Sequence
  Cyclic GFR-binding peptide
EPLTMLYYDEYDKVVEQLSNNDKQQII

SEQ ID NO: 96752 - protein, 27 aa, Artificial Sequence
  Cyclic GFR-binding peptide
EPLPIVYYIGKTPKIEQLSNNDKQQII

SEQ ID NO: 96753 - protein, 27 aa, Artificial Sequence
  Cyclic GFR-binding peptide
EPLTILYYVGRKPKVEQLSNNDKQQII

SEQ ID NO: 96754 - protein, 27 aa, Artificial Sequence
  Cyclic GFR-binding peptide
EPLPIVYYVGRTPKVEQLSNNDKQQII

SEQ ID NO: 96755 - protein, 27 aa, Artificial Sequence
  Cyclic GFR-binding peptide
SPISVLFIDDSSNVIYKQYENDKQQII

SEQ ID NO: 96756 - protein, 27 aa, Artificial Sequence
  Cyclic GFR-binding peptide
SPISILFIVGRTPKVYKQYENDKQQII

SEQ ID NO: 96757 - protein, 27 aa, Artificial Sequence
  Cyclic GFR-binding peptide
EPLTMLYYDENEKVVEQLSNNDKQQII

SEQ ID NO: 96758 - protein, 27 aa, Artificial Sequence
  Cyclic GFR-binding peptide
EPLTILYYDSANNVVEQLSNNDKQQII

SEQ ID NO: 96759 - protein, 27 aa, Artificial Sequence
  Cyclic GFR-binding peptide
EPLPIVYYVGRKPKVEQLSNNDKQQII

SEQ ID NO: 96760 - protein, 27 aa, Artificial Sequence
  Cyclic GFR-binding peptide
EPLPIVYYDSANNVVEQLSNNDKQQII

SEQ ID NO: 96761 - protein, 27 aa, Artificial Sequence
  Cyclic GFR-binding peptide
EPLTILYYVGRTPKVEQLSNNDKQQII

SEQ ID NO: 96762 - protein, 27 aa, Artificial Sequence
  Cyclic GFR-binding peptide
SPISILFIIGKTPKIYKQYENDKQQII

SEQ ID NO: 96763 - protein, 27 aa, Artificial Sequence
  Cyclic GFR-binding peptide
SPISILFIDSANNVVYKQYENDKQQII

SEQ ID NO: 96764 - protein, 27 aa, Artificial Sequence
  Cyclic GFR-binding peptide
EPLPVVYYDDSSNVIEQLSNNDKQQII

SEQ ID NO: 96765 - protein, 27 aa, Artificial Sequence
  Cyclic GFR-binding peptide
EPLPMVYYDEYDKVVEQLSNNDKQQII

SEQ ID NO: 96766 - protein, 27 aa, Artificial Sequence
  Cyclic GFR-binding peptide
SPISMLFIDENEKVVYKQYENDKQQII

SEQ ID NO: 96767 - protein, 27 aa, Artificial Sequence
  Cyclic GFR-binding peptide
EPLPMVYYDENEKVVEQLSNNDKQQII

SEQ ID NO: 96768 - protein, 27 aa, Artificial Sequence
  Cyclic GFR-binding peptide
SPISMLFIDEYDKVVYKQYENDKQQII

SEQ ID NO: 96769 - protein, 27 aa, Artificial Sequence
  Cyclic GFR-binding peptide
SAISILYLDSANNVVLKNYQNDKQQII

SEQ ID NO: 96770 - protein, 27 aa, Artificial Sequence
  Cyclic GFR-binding peptide
EPLTILYYIGKTPKIEQLSNNDKQQII

SEQ ID NO: 96771 - protein, 27 aa, Artificial Sequence
  Cyclic GFR-binding peptide
SPISILFIVGRKPKVYKQYENDKQQII

SEQ ID NO: 96772 - protein, 27 aa, Artificial Sequence
  Cyclic GFR-binding peptide
NAISILYFDSANNVVLKKYRNDKQQII

SEQ ID NO: 96773 - protein, 27 aa, Artificial Sequence
  Cyclic GFR-binding peptide
EPLTVLYYDDSSNVIEQLSNNDKQQII

SEQ ID NO: 96774 - protein, 29 aa, Artificial Sequence
  Cyclic GFR-binding peptide
NDKQQIIVTAKKLKPKKRVYEIKRVQVPR

SEQ ID NO: 96775 - protein, 29 aa, Artificial Sequence
  Cyclic GFR-binding peptide
NDKQQIIVQVEKLKPKKRVYEVKAVKVSR

SEQ ID NO: 96776 - protein, 29 aa, Artificial Sequence
  Cyclic GFR-binding peptide
NDKQQIIVQVEKFIPKKRVIEVKAVKVSR

SEQ ID NO: 96777 - protein, 29 aa, Artificial Sequence
  Cyclic GFR-binding peptide
NDKQQIIVQVEKHQGQHPKIRVKAMKVSR

SEQ ID NO: 96778 - protein, 29 aa, Artificial Sequence
  Cyclic GFR-binding peptide
NDKQQIIVTAKKHQGQHPKIRIKRMQVPR

SEQ ID NO: 96779 - protein, 29 aa, Artificial Sequence
  Cyclic GFR-binding peptide
NDKQQIISMEGLLKPKKRVYEMIQVTINS

SEQ ID NO: 96780 - protein, 29 aa, Artificial Sequence
  Cyclic GFR-binding peptide
NDKQQIISMEGIFIPKKRVIEMIQVTINS

SEQ ID NO: 96781 - protein, 29 aa, Artificial Sequence
  Cyclic GFR-binding peptide
NDKQQIISMEGLHQGQHPKIRMIQMTINS

SEQ ID NO: 96782 - protein, 29 aa, Artificial Sequence
  Cyclic GFR-binding peptide
NDKQQIISMEGILKPKKRVYEMIQVTINS

SEQ ID NO: 96783 - protein, 29 aa, Artificial Sequence
  Cyclic GFR-binding peptide
NDKQQIISMEGLFIPKKRVIEMIQVTINS

SEQ ID NO: 96784 - protein, 29 aa, Artificial Sequence
  Cyclic GFR-binding peptide
NDKQQIIVTAKKFIPKKRVIEIKRVQVPR

SEQ ID NO: 96785 - protein, 29 aa, Artificial Sequence
  Cyclic GFR-binding peptide
NDKQQIISMEGIHQGQHPKIRMIQMTINS

SEQ ID NO: 96786 - protein, 29 aa, Artificial Sequence
  Cyclic GFR-binding peptide
RPVQVRKIEYVRKKPKLKKATVNDKQQII

SEQ ID NO: 96787 - protein, 29 aa, Artificial Sequence
  Cyclic GFR-binding peptide
RSVKVAKVEYVRKKPKLKEVQVNDKQQII

SEQ ID NO: 96788 - protein, 29 aa, Artificial Sequence
  Cyclic GFR-binding peptide
RSVKVAKVEIVRKKPIFKEVQVNDKQQII

SEQ ID NO: 96789 - protein, 29 aa, Artificial Sequence
  Cyclic GFR-binding peptide
RSVKMAKVRIKPHQGQHKEVQVNDKQQII

SEQ ID NO: 96790 - protein, 29 aa, Artificial Sequence
  Cyclic GFR-binding peptide
RPVQMRKIRIKPHQGQHKKATVNDKQQII

SEQ ID NO: 96791 - protein, 29 aa, Artificial Sequence
  Cyclic GFR-binding peptide
SNITVQIMEYVRKKPKLLGEMSNDKQQII

SEQ ID NO: 96792 - protein, 29 aa, Artificial Sequence
  Cyclic GFR-binding peptide
SNITVQIMEIVRKKPIFIGEMSNDKQQII

SEQ ID NO: 96793 - protein, 29 aa, Artificial Sequence
  Cyclic GFR-binding peptide
SNITMQIMRIKPHQGQHLGEMSNDKQQII

SEQ ID NO: 96794 - protein, 29 aa, Artificial Sequence
  Cyclic GFR-binding peptide
SNITVQIMEYVRKKPKLIGEMSNDKQQII

SEQ ID NO: 96795 - protein, 29 aa, Artificial Sequence
  Cyclic GFR-binding peptide
SNITVQIMEIVRKKPIFLGEMSNDKQQII

SEQ ID NO: 96796 - protein, 29 aa, Artificial Sequence
  Cyclic GFR-binding peptide
RPVQVRKIEIVRKKPIFKKATVNDKQQII

SEQ ID NO: 96797 - protein, 29 aa, Artificial Sequence
  Cyclic GFR-binding peptide
SNITMQIMRIKPHQGQHIGEMSNDKQQII

SEQ ID NO: 96798 - protein, 27 aa, Artificial Sequence
  Cyclic GFR-binding peptide
NDKQQIIEYKFKVKPTRGVLYLISIPE

SEQ ID NO: 96799 - protein, 27 aa, Artificial Sequence
  Cyclic GFR-binding peptide
NDKQQIIEYKFKTPVGMDDLYLVSIPE

SEQ ID NO: 96800 - protein, 27 aa, Artificial Sequence
  Cyclic GFR-binding peptide
NDKQQIIEYQKYVKPKRGVIYLISIPS

SEQ ID NO: 96801 - protein, 27 aa, Artificial Sequence
  Cyclic GFR-binding peptide
NDKQQIIEYQKYVVKDYEDIYLMSIPS

SEQ ID NO: 96802 - protein, 27 aa, Artificial Sequence
  Cyclic GFR-binding peptide
NDKQQIIEYKFKIKPTKGILYLISIPE

SEQ ID NO: 96803 - protein, 27 aa, Artificial Sequence
  Cyclic GFR-binding peptide
NDKQQIIYHYKLYTVVGKDKYLISIPS

SEQ ID NO: 96804 - protein, 27 aa, Artificial Sequence
  Cyclic GFR-binding peptide
NDKQQIIRYKKLYTVVGKDFYLISIAN

SEQ ID NO: 96805 - protein, 27 aa, Artificial Sequence
  Cyclic GFR-binding peptide
NDKQQIIEYQKYVVNNAADIYLISIPS

SEQ ID NO: 96806 - protein, 27 aa, Artificial Sequence
  Cyclic GFR-binding peptide
NDKQQIIEYQKYVKPTRGVIYLISIPS

SEQ ID NO: 96807 - protein, 27 aa, Artificial Sequence
  Cyclic GFR-binding peptide
NDKQQIIEYQKYTPVGMDDIYLVSIPS

SEQ ID NO: 96808 - protein, 27 aa, Artificial Sequence
  Cyclic GFR-binding peptide
NDKQQIIEYKFKVVKDYEDLYLMSIPE

SEQ ID NO: 96809 - protein, 27 aa, Artificial Sequence
  Cyclic GFR-binding peptide
NDKQQIIEYKFKVVNNAADLYLISIPE

SEQ ID NO: 96810 - protein, 27 aa, Artificial Sequence
  Cyclic GFR-binding peptide
NDKQQIIEYQKYVVKENEDIYLMSIPS

SEQ ID NO: 96811 - protein, 27 aa, Artificial Sequence
  Cyclic GFR-binding peptide
NDKQQIIEYQKYIKPTKGIIYLISIPS

SEQ ID NO: 96812 - protein, 27 aa, Artificial Sequence
  Cyclic GFR-binding peptide
NDKQQIIRYKKLVVNNAADFYLISIAN

SEQ ID NO: 96813 - protein, 27 aa, Artificial Sequence
  Cyclic GFR-binding peptide
NDKQQIIYHYKLVVNNAADKYLISIPS

SEQ ID NO: 96814 - protein, 27 aa, Artificial Sequence
  Cyclic GFR-binding peptide
NDKQQIIEYKFKIVNNSSDLYLVSIPE

SEQ ID NO: 96815 - protein, 27 aa, Artificial Sequence
  Cyclic GFR-binding peptide
NDKQQIIEYQKYIVNSSDDIYLVSIPS

SEQ ID NO: 96816 - protein, 27 aa, Artificial Sequence
  Cyclic GFR-binding peptide
NDKQQIIEYKFKIVNSSDDLYLVSIPE

SEQ ID NO: 96817 - protein, 27 aa, Artificial Sequence
  Cyclic GFR-binding peptide
NDKQQIIEYKFKVKPKRGVLYLISIPE

SEQ ID NO: 96818 - protein, 27 aa, Artificial Sequence
  Cyclic GFR-binding peptide
NDKQQIIEYQKYYTVVGKDIYLISIPS

SEQ ID NO: 96819 - protein, 27 aa, Artificial Sequence
  Cyclic GFR-binding peptide
NDKQQIIEYKFKVVKENEDLYLMSIPE

SEQ ID NO: 96820 - protein, 27 aa, Artificial Sequence
  Cyclic GFR-binding peptide
NDKQQIIEYQKYIVNNSSDIYLVSIPS

SEQ ID NO: 96821 - protein, 27 aa, Artificial Sequence
  Cyclic GFR-binding peptide
NDKQQIIEYKFKYTVVGKDLYLISIPE

SEQ ID NO: 96822 - protein, 27 aa, Artificial Sequence
  Cyclic GFR-binding peptide
EPISILYLVGRTPKVKFKYENDKQQII

SEQ ID NO: 96823 - protein, 27 aa, Artificial Sequence
  Cyclic GFR-binding peptide
EPISVLYLDDMGVPTKFKYENDKQQII

SEQ ID NO: 96824 - protein, 27 aa, Artificial Sequence
  Cyclic GFR-binding peptide
SPISILYIVGRKPKVYKQYENDKQQII

SEQ ID NO: 96825 - protein, 27 aa, Artificial Sequence
  Cyclic GFR-binding peptide
SPISMLYIDEYDKVVYKQYENDKQQII

SEQ ID NO: 96826 - protein, 27 aa, Artificial Sequence
  Cyclic GFR-binding peptide
EPISILYLIGKTPKIKFKYENDKQQII

SEQ ID NO: 96827 - protein, 27 aa, Artificial Sequence
  Cyclic GFR-binding peptide
SPISILYKDKGVVTYLKYHYNDKQQII

SEQ ID NO: 96828 - protein, 27 aa, Artificial Sequence
  Cyclic GFR-binding peptide
NAISILYFDKGVVTYLKKYRNDKQQII

SEQ ID NO: 96829 - protein, 27 aa, Artificial Sequence
  Cyclic GFR-binding peptide
SPISILYIDAANNVVYKQYENDKQQII

SEQ ID NO: 96830 - protein, 27 aa, Artificial Sequence
  Cyclic GFR-binding peptide
SPISILYIVGRTPKVYKQYENDKQQII

SEQ ID NO: 96831 - protein, 27 aa, Artificial Sequence
  Cyclic GFR-binding peptide
SPISVLYIDDMGVPTYKQYENDKQQII

SEQ ID NO: 96832 - protein, 27 aa, Artificial Sequence
  Cyclic GFR-binding peptide
EPISMLYLDEYDKVVKFKYENDKQQII

SEQ ID NO: 96833 - protein, 27 aa, Artificial Sequence
  Cyclic GFR-binding peptide
EPISILYLDAANNVVKFKYENDKQQII

SEQ ID NO: 96834 - protein, 27 aa, Artificial Sequence
  Cyclic GFR-binding peptide
SPISMLYIDENEKVVYKQYENDKQQII

SEQ ID NO: 96835 - protein, 27 aa, Artificial Sequence
  Cyclic GFR-binding peptide
SPISILYIIGKTPKIYKQYENDKQQII

SEQ ID NO: 96836 - protein, 27 aa, Artificial Sequence
  Cyclic GFR-binding peptide
NAISILYFDAANNVVLKKYRNDKQQII

SEQ ID NO: 96837 - protein, 27 aa, Artificial Sequence
  Cyclic GFR-binding peptide
SPISILYKDAANNVVLKYHYNDKQQII

SEQ ID NO: 96838 - protein, 27 aa, Artificial Sequence
  Cyclic GFR-binding peptide
EPISVLYLDSSNNVIKFKYENDKQQII

SEQ ID NO: 96839 - protein, 27 aa, Artificial Sequence
  Cyclic GFR-binding peptide
SPISVLYIDDSSNVIYKQYENDKQQII

SEQ ID NO: 96840 - protein, 27 aa, Artificial Sequence
  Cyclic GFR-binding peptide
EPISVLYLDDSSNVIKFKYENDKQQII

SEQ ID NO: 96841 - protein, 27 aa, Artificial Sequence
  Cyclic GFR-binding peptide
EPISILYLVGRKPKVKFKYENDKQQII

SEQ ID NO: 96842 - protein, 27 aa, Artificial Sequence
  Cyclic GFR-binding peptide
SPISILYIDKGVVTYYKQYENDKQQII

SEQ ID NO: 96843 - protein, 27 aa, Artificial Sequence
  Cyclic GFR-binding peptide
EPISMLYLDENEKVVKFKYENDKQQII

SEQ ID NO: 96844 - protein, 27 aa, Artificial Sequence
  Cyclic GFR-binding peptide
SPISVLYIDSSNNVIYKQYENDKQQII

SEQ ID NO: 96845 - protein, 27 aa, Artificial Sequence
  Cyclic GFR-binding peptide
EPISILYLDKGVVTYKFKYENDKQQII

SEQ ID NO: 96846 - protein, 27 aa, Artificial Sequence
  Cyclic GFR-binding peptide
NDKQQIIPIKGYIIQQKDNFYLMNIPS

SEQ ID NO: 96847 - protein, 27 aa, Artificial Sequence
  Cyclic GFR-binding peptide
NDKQQIIPIKGYVVKDYEDFYLMNIPS

SEQ ID NO: 96848 - protein, 27 aa, Artificial Sequence
  Cyclic GFR-binding peptide
NDKQQIIPIKGYIVNSSDDFYLVNIPS

SEQ ID NO: 96849 - protein, 27 aa, Artificial Sequence
  Cyclic GFR-binding peptide
NDKQQIIPIKGYVVNNAADFYLINIPS

SEQ ID NO: 96850 - protein, 27 aa, Artificial Sequence
  Cyclic GFR-binding peptide
NDKQQIIPIKGYYTVVGKDFYLINIPS

SEQ ID NO: 96851 - protein, 27 aa, Artificial Sequence
  Cyclic GFR-binding peptide
NDKQQIIPIKGYLLVRGNDFYLMNIPS

SEQ ID NO: 96852 - protein, 27 aa, Artificial Sequence
  Cyclic GFR-binding peptide
NDKQQIIPIKGYVVKENEDFYLMNIPS

SEQ ID NO: 96853 - protein, 27 aa, Artificial Sequence
  Cyclic GFR-binding peptide
NDKQQIIPIKGYVVNNASDFYLINIPS

SEQ ID NO: 96854 - protein, 27 aa, Artificial Sequence
  Cyclic GFR-binding peptide
NDKQQIIPIKGYTPVGMDDFYLVNIPS

SEQ ID NO: 96855 - protein, 27 aa, Artificial Sequence
  Cyclic GFR-binding peptide
NDKQQIIPIKGYIVNNSSDFYLVNIPS

SEQ ID NO: 96856 - protein, 27 aa, Artificial Sequence
  Cyclic GFR-binding peptide
SPINMLYFNDKQQIIYGKIPNDKQQII

SEQ ID NO: 96857 - protein, 27 aa, Artificial Sequence
  Cyclic GFR-binding peptide
SPINMLYFDEYDKVVYGKIPNDKQQII

SEQ ID NO: 96858 - protein, 27 aa, Artificial Sequence
  Cyclic GFR-binding peptide
SPINVLYFDDSSNVIYGKIPNDKQQII

SEQ ID NO: 96859 - protein, 27 aa, Artificial Sequence
  Cyclic GFR-binding peptide
SPINILYFDAANNVVYGKIPNDKQQII

SEQ ID NO: 96860 - protein, 27 aa, Artificial Sequence
  Cyclic GFR-binding peptide
SPINILYFDKGVVTYYGKIPNDKQQII

SEQ ID NO: 96861 - protein, 27 aa, Artificial Sequence
  Cyclic GFR-binding peptide
SPINMLYFDNGRVLLYGKIPNDKQQII

SEQ ID NO: 96862 - protein, 27 aa, Artificial Sequence
  Cyclic GFR-binding peptide
SPINMLYFDENEKVVYGKIPNDKQQII

SEQ ID NO: 96863 - protein, 27 aa, Artificial Sequence
  Cyclic GFR-binding peptide
SPINILYFDSANNVVYGKIPNDKQQII

SEQ ID NO: 96864 - protein, 27 aa, Artificial Sequence
  Cyclic GFR-binding peptide
SPINVLYFDDMGVPTYGKIPNDKQQII

SEQ ID NO: 96865 - protein, 27 aa, Artificial Sequence
  Cyclic GFR-binding peptide
SPINVLYFDSSNNVIYGKIPNDKQQII

SEQ ID NO: 96866 - protein, 27 aa, Artificial Sequence
  Cyclic GFR-binding peptide
NDKQQIIEYQKYVVNNASDIYLISIPS

SEQ ID NO: 96867 - protein, 27 aa, Artificial Sequence
  Cyclic GFR-binding peptide
NDKQQIIEYQKYIIQQKDNIYLMSIPS

SEQ ID NO: 96868 - protein, 27 aa, Artificial Sequence
  Cyclic GFR-binding peptide
NDKQQIIEYQKYLLVRGNDIYLMSIPS

SEQ ID NO: 96869 - protein, 27 aa, Artificial Sequence
  Cyclic GFR-binding peptide
SPISILYIDSANNVVYKQYENDKQQII

SEQ ID NO: 96870 - protein, 27 aa, Artificial Sequence
  Cyclic GFR-binding peptide
SPISMLYINDKQQIIYKQYENDKQQII

SEQ ID NO: 96871 - protein, 27 aa, Artificial Sequence
  Cyclic GFR-binding peptide
SPISMLYIDNGRVLLYKQYENDKQQII

SEQ ID NO: 96872 - protein, 27 aa, Artificial Sequence
  Cyclic GFR-binding peptide
NDKQQIIPYVKLYTVVGKDFFLISLSS

SEQ ID NO: 96873 - protein, 27 aa, Artificial Sequence
  Cyclic GFR-binding peptide
NDKQQIIPYVKLIKPTKGIFFLISLSS

SEQ ID NO: 96874 - protein, 27 aa, Artificial Sequence
  Cyclic GFR-binding peptide
NDKQQIIPYVKLIIQQKDNFFLMSLSS

SEQ ID NO: 96875 - protein, 27 aa, Artificial Sequence
  Cyclic GFR-binding peptide
NDKQQIIPYVKLIVNSSDDFFLVSLSS

SEQ ID NO: 96876 - protein, 27 aa, Artificial Sequence
  Cyclic GFR-binding peptide
NDKQQIIPYVKLVKPKRGVFFLISLSS

SEQ ID NO: 96877 - protein, 27 aa, Artificial Sequence
  Cyclic GFR-binding peptide
NDKQQIIPYVKLVKPTRGVFFLISLSS

SEQ ID NO: 96878 - protein, 27 aa, Artificial Sequence
  Cyclic GFR-binding peptide
NDKQQIIPYVKLTPVGMDDFFLVSLSS

SEQ ID NO: 96879 - protein, 29 aa, Artificial Sequence
  Cyclic GFR-binding peptide
NDKQQIIPYVKLHQGQHPKIRFFLMSLSS

SEQ ID NO: 96880 - protein, 27 aa, Artificial Sequence
  Cyclic GFR-binding peptide
NDKQQIIPYVKLVVNKNEDFFLISLSS

SEQ ID NO: 96881 - protein, 27 aa, Artificial Sequence
  Cyclic GFR-binding peptide
NDKQQIIPYVKLVVNNASDFFLISLSS

SEQ ID NO: 96882 - protein, 27 aa, Artificial Sequence
  Cyclic GFR-binding peptide
NDKQQIIPYVKLVVKENEDFFLMSLSS

SEQ ID NO: 96883 - protein, 27 aa, Artificial Sequence
  Cyclic GFR-binding peptide
NDKQQIIPYVKLIVNNSSDFFLVSLSS

SEQ ID NO: 96884 - protein, 29 aa, Artificial Sequence
  Cyclic GFR-binding peptide
NDKQQIIPYVKLLKPKKRVYEFFLVSLSS

SEQ ID NO: 96885 - protein, 27 aa, Artificial Sequence
  Cyclic GFR-binding peptide
NDKQQIIPYVKLLLVRGNDFFLMSLSS

SEQ ID NO: 96886 - protein, 27 aa, Artificial Sequence
  Cyclic GFR-binding peptide
NDKQQIIPYVKLVVKDYEDFFLMSLSS

SEQ ID NO: 96887 - protein, 27 aa, Artificial Sequence
  Cyclic GFR-binding peptide
NDKQQIIPYVKLVVNNAADFFLISLSS

SEQ ID NO: 96888 - protein, 27 aa, Artificial Sequence
  Cyclic GFR-binding peptide
SSLSILFFDKGVVTYLKVYPNDKQQII

SEQ ID NO: 96889 - protein, 27 aa, Artificial Sequence
  Cyclic GFR-binding peptide
SSLSILFFIGKTPKILKVYPNDKQQII

SEQ ID NO: 96890 - protein, 27 aa, Artificial Sequence
  Cyclic GFR-binding peptide
SSLSMLFFNDKQQIILKVYPNDKQQII

SEQ ID NO: 96891 - protein, 27 aa, Artificial Sequence
  Cyclic GFR-binding peptide
SSLSVLFFDDSSNVILKVYPNDKQQII

SEQ ID NO: 96892 - protein, 27 aa, Artificial Sequence
  Cyclic GFR-binding peptide
SSLSILFFVGRKPKVLKVYPNDKQQII

SEQ ID NO: 96893 - protein, 27 aa, Artificial Sequence
  Cyclic GFR-binding peptide
SSLSILFFVGRTPKVLKVYPNDKQQII

SEQ ID NO: 96894 - protein, 27 aa, Artificial Sequence
  Cyclic GFR-binding peptide
SSLSVLFFDDMGVPTLKVYPNDKQQII

SEQ ID NO: 96895 - protein, 29 aa, Artificial Sequence
  Cyclic GFR-binding peptide
SSLSMLFFRIKPHQGQHLKVYPNDKQQII

SEQ ID NO: 96896 - protein, 27 aa, Artificial Sequence
  Cyclic GFR-binding peptide
SSLSILFFDENKNVVLKVYPNDKQQII

SEQ ID NO: 96897 - protein, 27 aa, Artificial Sequence
  Cyclic GFR-binding peptide
SSLSILFFDSANNVVLKVYPNDKQQII

SEQ ID NO: 96898 - protein, 27 aa, Artificial Sequence
  Cyclic GFR-binding peptide
SSLSMLFFDENEKVVLKVYPNDKQQII

SEQ ID NO: 96899 - protein, 27 aa, Artificial Sequence
  Cyclic GFR-binding peptide
SSLSVLFFDSSNNVILKVYPNDKQQII

SEQ ID NO: 96900 - protein, 29 aa, Artificial Sequence
  Cyclic GFR-binding peptide
SSLSVLFFEYVRKKPKLLKVYPNDKQQII

SEQ ID NO: 96901 - protein, 27 aa, Artificial Sequence
  Cyclic GFR-binding peptide
SSLSMLFFDNGRVLLLKVYPNDKQQII

SEQ ID NO: 96902 - protein, 27 aa, Artificial Sequence
  Cyclic GFR-binding peptide
SSLSMLFFDEYDKVVLKVYPNDKQQII

SEQ ID NO: 96903 - protein, 27 aa, Artificial Sequence
  Cyclic GFR-binding peptide
SSLSILFFDAANNVVLKVYPNDKQQII

SEQ ID NO: 96904 - protein, 27 aa, Artificial Sequence
  Cyclic GFR-binding peptide
NDKQQIISMEGIIVNSSDDMIQVTINS

SEQ ID NO: 96905 - protein, 27 aa, Artificial Sequence
  Cyclic GFR-binding peptide
NDKQQIIVTAKKVVKENEDIKRMQVPR

SEQ ID NO: 96906 - protein, 27 aa, Artificial Sequence
  Cyclic GFR-binding peptide
NDKQQIISMEGIVVKDYEDMIQMTINS

SEQ ID NO: 96907 - protein, 27 aa, Artificial Sequence
  Cyclic GFR-binding peptide
NDKQQIIVTAKKIKPTKGIIKRIQVPR

SEQ ID NO: 96908 - protein, 27 aa, Artificial Sequence
  Cyclic GFR-binding peptide
NDKQQIISMEGIVKPTRGVMIQITINS

SEQ ID NO: 96909 - protein, 29 aa, Artificial Sequence
  Cyclic GFR-binding peptide
NDKQQIINSLQEFIPKKRVIEYYVVPLPE

SEQ ID NO: 96910 - protein, 27 aa, Artificial Sequence
  Cyclic GFR-binding peptide
NDKQQIIVQVEKVKPKRGVVKAIKVSR

SEQ ID NO: 96911 - protein, 27 aa, Artificial Sequence
  Cyclic GFR-binding peptide
NDKQQIIVQVEKVVKENEDVKAMKVSR

SEQ ID NO: 96912 - protein, 27 aa, Artificial Sequence
  Cyclic GFR-binding peptide
NDKQQIIVTAKKIVNSSDDIKRVQVPR

SEQ ID NO: 96913 - protein, 27 aa, Artificial Sequence
  Cyclic GFR-binding peptide
NDKQQIIVQVEKIKPTKGIVKAIKVSR

SEQ ID NO: 96914 - protein, 29 aa, Artificial Sequence
  Cyclic GFR-binding peptide
NDKQQIINSLQEFIPKKRVIEYYLVTLPE

SEQ ID NO: 96915 - protein, 27 aa, Artificial Sequence
  Cyclic GFR-binding peptide
NDKQQIIVQVEKIVNSSDDVKAVKVSR

SEQ ID NO: 96916 - protein, 27 aa, Artificial Sequence
  Cyclic GFR-binding peptide
NDKQQIIVTAKKVKPKRGVIKRIQVPR

SEQ ID NO: 96917 - protein, 27 aa, Artificial Sequence
  Cyclic GFR-binding peptide
NDKQQIIVQVEKVKPTRGVVKAIKVSR

SEQ ID NO: 96918 - protein, 27 aa, Artificial Sequence
  Cyclic GFR-binding peptide
NDKQQIIVTAKKVKPTRGVIKRIQVPR

SEQ ID NO: 96919 - protein, 29 aa, Artificial Sequence
  Cyclic GFR-binding peptide
NDKQQIINSLQELKPKKRVYEYYLVTLPE

SEQ ID NO: 96920 - protein, 27 aa, Artificial Sequence
  Cyclic GFR-binding peptide
NDKQQIISMEGIVKPKRGVMIQITINS

SEQ ID NO: 96921 - protein, 27 aa, Artificial Sequence
  Cyclic GFR-binding peptide
NDKQQIISMEGIVVKENEDMIQMTINS

SEQ ID NO: 96922 - protein, 27 aa, Artificial Sequence
  Cyclic GFR-binding peptide
NDKQQIISMEGIIKPTKGIMIQITINS

SEQ ID NO: 96923 - protein, 29 aa, Artificial Sequence
  Cyclic GFR-binding peptide
NDKQQIINSLQEHQGQHPKIRYYLMTLPE

SEQ ID NO: 96924 - protein, 27 aa, Artificial Sequence
  Cyclic GFR-binding peptide
NDKQQIIVTAKKVVKDYEDIKRMQVPR

SEQ ID NO: 96925 - protein, 29 aa, Artificial Sequence
  Cyclic GFR-binding peptide
NDKQQIINSLQEHQGQHPKIRYYVMPLPE

SEQ ID NO: 96926 - protein, 29 aa, Artificial Sequence
  Cyclic GFR-binding peptide
NDKQQIINSLQELKPKKRVYEYYVVPLPE

SEQ ID NO: 96927 - protein, 27 aa, Artificial Sequence
  Cyclic GFR-binding peptide
NDKQQIIVQVEKVVKDYEDVKAMKVSR

SEQ ID NO: 96928 - protein, 27 aa, Artificial Sequence
  Cyclic GFR-binding peptide
SNITVQIMDDSSNVIIGEMSNDKQQII

SEQ ID NO: 96929 - protein, 27 aa, Artificial Sequence
  Cyclic GFR-binding peptide
RPVQMRKIDENEKVVKKATVNDKQQII

SEQ ID NO: 96930 - protein, 27 aa, Artificial Sequence
  Cyclic GFR-binding peptide
SNITMQIMDEYDKVVIGEMSNDKQQII

SEQ ID NO: 96931 - protein, 27 aa, Artificial Sequence
  Cyclic GFR-binding peptide
RPVQIRKIIGKTPKIKKATVNDKQQII

SEQ ID NO: 96932 - protein, 27 aa, Artificial Sequence
  Cyclic GFR-binding peptide
SNITIQIMVGRTPKVIGEMSNDKQQII

SEQ ID NO: 96933 - protein, 29 aa, Artificial Sequence
  Cyclic GFR-binding peptide
EPLPVVYYEIVRKKPIFEQLSNNDKQQII

SEQ ID NO: 96934 - protein, 27 aa, Artificial Sequence
  Cyclic GFR-binding peptide
RSVKIAKVVGRKPKVKEVQVNDKQQII

SEQ ID NO: 96935 - protein, 27 aa, Artificial Sequence
  Cyclic GFR-binding peptide
RSVKMAKVDENEKVVKEVQVNDKQQII

SEQ ID NO: 96936 - protein, 27 aa, Artificial Sequence
  Cyclic GFR-binding peptide
RPVQVRKIDDSSNVIKKATVNDKQQII

SEQ ID NO: 96937 - protein, 27 aa, Artificial Sequence
  Cyclic GFR-binding peptide
RSVKIAKVIGKTPKIKEVQVNDKQQII

SEQ ID NO: 96938 - protein, 29 aa, Artificial Sequence
  Cyclic GFR-binding peptide
EPLTVLYYEIVRKKPIFEQLSNNDKQQII

SEQ ID NO: 96939 - protein, 27 aa, Artificial Sequence
  Cyclic GFR-binding peptide
RSVKVAKVDDSSNVIKEVQVNDKQQII

SEQ ID NO: 96940 - protein, 27 aa, Artificial Sequence
  Cyclic GFR-binding peptide
RPVQIRKIVGRKPKVKKATVNDKQQII

SEQ ID NO: 96941 - protein, 27 aa, Artificial Sequence
  Cyclic GFR-binding peptide
RSVKIAKVVGRTPKVKEVQVNDKQQII

SEQ ID NO: 96942 - protein, 27 aa, Artificial Sequence
  Cyclic GFR-binding peptide
RPVQIRKIVGRTPKVKKATVNDKQQII

SEQ ID NO: 96943 - protein, 29 aa, Artificial Sequence
  Cyclic GFR-binding peptide
EPLTVLYYEYVRKKPKLEQLSNNDKQQII

SEQ ID NO: 96944 - protein, 27 aa, Artificial Sequence
  Cyclic GFR-binding peptide
SNITIQIMVGRKPKVIGEMSNDKQQII

SEQ ID NO: 96945 - protein, 27 aa, Artificial Sequence
  Cyclic GFR-binding peptide
SNITMQIMDENEKVVIGEMSNDKQQII

SEQ ID NO: 96946 - protein, 27 aa, Artificial Sequence
  Cyclic GFR-binding peptide
SNITIQIMIGKTPKIIGEMSNDKQQII

SEQ ID NO: 96947 - protein, 29 aa, Artificial Sequence
  Cyclic GFR-binding peptide
EPLTMLYYRIKPHQGQHEQLSNNDKQQII

SEQ ID NO: 96948 - protein, 27 aa, Artificial Sequence
  Cyclic GFR-binding peptide
RPVQMRKIDEYDKVVKKATVNDKQQII

SEQ ID NO: 96949 - protein, 29 aa, Artificial Sequence
  Cyclic GFR-binding peptide
EPLPMVYYRIKPHQGQHEQLSNNDKQQII

SEQ ID NO: 96950 - protein, 29 aa, Artificial Sequence
  Cyclic GFR-binding peptide
EPLPVVYYEYVRKKPKLEQLSNNDKQQII

SEQ ID NO: 96951 - protein, 27 aa, Artificial Sequence
  Cyclic GFR-binding peptide
RSVKMAKVDEYDKVVKEVQVNDKQQII

SEQ ID NO: 96952 - protein, 27 aa, Artificial Sequence
  Cyclic GFR-binding peptide
NDKQQIIRYKKLIIQQKDNFYLMSIAN

SEQ ID NO: 96953 - protein, 27 aa, Artificial Sequence
  Cyclic GFR-binding peptide
NDKQQIIRYKKLLLVRGNDFYLMSIAN

SEQ ID NO: 96954 - protein, 27 aa, Artificial Sequence
  Cyclic GFR-binding peptide
NAISMLYFNDKQQIILKKYRNDKQQII

SEQ ID NO: 96955 - protein, 27 aa, Artificial Sequence
  Cyclic GFR-binding peptide
NAISMLYFDNGRVLLLKKYRNDKQQII

SEQ ID NO: 96956 - protein, 27 aa, Artificial Sequence
  Cyclic GFR-binding peptide
NDKQQIIEYKFKVVNKNEDLYLISIPE

SEQ ID NO: 96957 - protein, 27 aa, Artificial Sequence
  Cyclic GFR-binding peptide
NDKQQIIPIKGYVKPTRGVFYLINIPS

SEQ ID NO: 96958 - protein, 27 aa, Artificial Sequence
  Cyclic GFR-binding peptide
NDKQQIIEYKFKLLVRGNDLYLMSIPE

SEQ ID NO: 96959 - protein, 27 aa, Artificial Sequence
  Cyclic GFR-binding peptide
NDKQQIIYHYKLVVNKNEDKYLISIPS

SEQ ID NO: 96960 - protein, 27 aa, Artificial Sequence
  Cyclic GFR-binding peptide
NDKQQIIRHKRLLLVRGNDYYLMSTAS

SEQ ID NO: 96961 - protein, 27 aa, Artificial Sequence
  Cyclic GFR-binding peptide
NDKQQIIYHYKLLLVRGNDKYLMSIPS

SEQ ID NO: 96962 - protein, 27 aa, Artificial Sequence
  Cyclic GFR-binding peptide
NDKQQIIRHKRLVVNKNEDYYLISTAS

SEQ ID NO: 96963 - protein, 27 aa, Artificial Sequence
  Cyclic GFR-binding peptide
NDKQQIIRYKKLVVNKNEDFYLISIAN

SEQ ID NO: 96964 - protein, 27 aa, Artificial Sequence
  Cyclic GFR-binding peptide
NDKQQIIPIKGYVVNKNEDFYLINIPS

SEQ ID NO: 96965 - protein, 27 aa, Artificial Sequence
  Cyclic GFR-binding peptide
NDKQQIIPIKGYIKPTKGIFYLINIPS

SEQ ID NO: 96966 - protein, 27 aa, Artificial Sequence
  Cyclic GFR-binding peptide
NDKQQIIRHKRLYTVVGKDYYLISTAS

SEQ ID NO: 96967 - protein, 27 aa, Artificial Sequence
  Cyclic GFR-binding peptide
NDKQQIIEYKFKVVNNASDLYLISIPE

SEQ ID NO: 96968 - protein, 27 aa, Artificial Sequence
  Cyclic GFR-binding peptide
NDKQQIIRHKRLIIQQKDNYYLMSTAS

SEQ ID NO: 96969 - protein, 27 aa, Artificial Sequence
  Cyclic GFR-binding peptide
NDKQQIIEYKFKIIQQKDNLYLMSIPE

SEQ ID NO: 96970 - protein, 27 aa, Artificial Sequence
  Cyclic GFR-binding peptide
NDKQQIIPIKGYVKPKRGVFYLINIPS

SEQ ID NO: 96971 - protein, 27 aa, Artificial Sequence
  Cyclic GFR-binding peptide
NDKQQIIRHKRLVVNNASDYYLISTAS

SEQ ID NO: 96972 - protein, 27 aa, Artificial Sequence
  Cyclic GFR-binding peptide
NDKQQIIYHYKLVVNNASDKYLISIPS

SEQ ID NO: 96973 - protein, 27 aa, Artificial Sequence
  Cyclic GFR-binding peptide
NDKQQIIYHYKLIIQQKDNKYLMSIPS

SEQ ID NO: 96974 - protein, 27 aa, Artificial Sequence
  Cyclic GFR-binding peptide
NDKQQIIRHKRLVVNNAADYYLISTAS

SEQ ID NO: 96975 - protein, 27 aa, Artificial Sequence
  Cyclic GFR-binding peptide
EPISILYLDENKNVVKFKYENDKQQII

SEQ ID NO: 96976 - protein, 27 aa, Artificial Sequence
  Cyclic GFR-binding peptide
SPINILYFVGRTPKVYGKIPNDKQQII

SEQ ID NO: 96977 - protein, 27 aa, Artificial Sequence
  Cyclic GFR-binding peptide
EPISMLYLDNGRVLLKFKYENDKQQII

SEQ ID NO: 96978 - protein, 27 aa, Artificial Sequence
  Cyclic GFR-binding peptide
SPISILYKDENKNVVLKYHYNDKQQII

SEQ ID NO: 96979 - protein, 27 aa, Artificial Sequence
  Cyclic GFR-binding peptide
SATSMLYYDNGRVLLLRKHRNDKQQII

SEQ ID NO: 96980 - protein, 27 aa, Artificial Sequence
  Cyclic GFR-binding peptide
SPISMLYKDNGRVLLLKYHYNDKQQII

SEQ ID NO: 96981 - protein, 27 aa, Artificial Sequence
  Cyclic GFR-binding peptide
SATSILYYDENKNVVLRKHRNDKQQII

SEQ ID NO: 96982 - protein, 27 aa, Artificial Sequence
  Cyclic GFR-binding peptide
NAISILYFDENKNVVLKKYRNDKQQII

SEQ ID NO: 96983 - protein, 27 aa, Artificial Sequence
  Cyclic GFR-binding peptide
SPINILYFDENKNVVYGKIPNDKQQII

SEQ ID NO: 96984 - protein, 27 aa, Artificial Sequence
  Cyclic GFR-binding peptide
SPINILYFIGKTPKIYGKIPNDKQQII

SEQ ID NO: 96985 - protein, 27 aa, Artificial Sequence
  Cyclic GFR-binding peptide
SATSILYYDKGVVTYLRKHRNDKQQII

SEQ ID NO: 96986 - protein, 27 aa, Artificial Sequence
  Cyclic GFR-binding peptide
EPISILYLDSANNVVKFKYENDKQQII

SEQ ID NO: 96987 - protein, 27 aa, Artificial Sequence
  Cyclic GFR-binding peptide
SATSMLYYNDKQQIILRKHRNDKQQII

SEQ ID NO: 96988 - protein, 27 aa, Artificial Sequence
  Cyclic GFR-binding peptide
EPISMLYLNDKQQIIKFKYENDKQQII

SEQ ID NO: 96989 - protein, 27 aa, Artificial Sequence
  Cyclic GFR-binding peptide
SPINILYFVGRKPKVYGKIPNDKQQII

SEQ ID NO: 96990 - protein, 27 aa, Artificial Sequence
  Cyclic GFR-binding peptide
SATSILYYDSANNVVLRKHRNDKQQII

SEQ ID NO: 96991 - protein, 27 aa, Artificial Sequence
  Cyclic GFR-binding peptide
SPISILYKDSANNVVLKYHYNDKQQII

SEQ ID NO: 96992 - protein, 27 aa, Artificial Sequence
  Cyclic GFR-binding peptide
SPISMLYKNDKQQIILKYHYNDKQQII

SEQ ID NO: 96993 - protein, 27 aa, Artificial Sequence
  Cyclic GFR-binding peptide
SATSILYYDAANNVVLRKHRNDKQQII

SEQ ID NO: 96994 - protein, 27 aa, Artificial Sequence
  Cyclic GFR-binding peptide
NDKQQIISMEGIIIQQKDNMIQMTINS

SEQ ID NO: 96995 - protein, 27 aa, Artificial Sequence
  Cyclic GFR-binding peptide
NDKQQIISMEGLVKPKRGVMIQITINS

SEQ ID NO: 96996 - protein, 27 aa, Artificial Sequence
  Cyclic GFR-binding peptide
NDKQQIISMEGLVVNNASDMIQITINS

SEQ ID NO: 96997 - protein, 27 aa, Artificial Sequence
  Cyclic GFR-binding peptide
NDKQQIISMEGILLVRGNDMIQMTINS

SEQ ID NO: 96998 - protein, 27 aa, Artificial Sequence
  Cyclic GFR-binding peptide
NDKQQIISMEGLIKPTKGIMIQITINS

SEQ ID NO: 96999 - protein, 27 aa, Artificial Sequence
  Cyclic GFR-binding peptide
NDKQQIISMEGLIVNSSDDMIQVTINS

SEQ ID NO: 97000 - protein, 27 aa, Artificial Sequence
  Cyclic GFR-binding peptide
NDKQQIISMEGIVVNNASDMIQITINS

SEQ ID NO: 97001 - protein, 27 aa, Artificial Sequence
  Cyclic GFR-binding peptide
NDKQQIISMEGLVVNNAADMIQITINS

SEQ ID NO: 97002 - protein, 27 aa, Artificial Sequence
  Cyclic GFR-binding peptide
NDKQQIISMEGLLLVRGNDMIQMTINS

SEQ ID NO: 97003 - protein, 27 aa, Artificial Sequence
  Cyclic GFR-binding peptide
NDKQQIISMEGLIIQQKDNMIQMTINS

SEQ ID NO: 97004 - protein, 27 aa, Artificial Sequence
  Cyclic GFR-binding peptide
NDKQQIISMEGIVVNNAADMIQITINS

SEQ ID NO: 97005 - protein, 27 aa, Artificial Sequence
  Cyclic GFR-binding peptide
NDKQQIISMEGLVKPTRGVMIQITINS

SEQ ID NO: 97006 - protein, 27 aa, Artificial Sequence
  Cyclic GFR-binding peptide
SNITMQIMNDKQQIIIGEMSNDKQQII

SEQ ID NO: 97007 - protein, 27 aa, Artificial Sequence
  Cyclic GFR-binding peptide
SNITIQIMVGRKPKVLGEMSNDKQQII

SEQ ID NO: 97008 - protein, 27 aa, Artificial Sequence
  Cyclic GFR-binding peptide
SNITIQIMDSANNVVLGEMSNDKQQII

SEQ ID NO: 97009 - protein, 27 aa, Artificial Sequence
  Cyclic GFR-binding peptide
SNITMQIMDNGRVLLIGEMSNDKQQII

SEQ ID NO: 97010 - protein, 27 aa, Artificial Sequence
  Cyclic GFR-binding peptide
SNITIQIMIGKTPKILGEMSNDKQQII

SEQ ID NO: 97011 - protein, 27 aa, Artificial Sequence
  Cyclic GFR-binding peptide
SNITVQIMDDSSNVILGEMSNDKQQII

SEQ ID NO: 97012 - protein, 27 aa, Artificial Sequence
  Cyclic GFR-binding peptide
SNITIQIMDSANNVVIGEMSNDKQQII

SEQ ID NO: 97013 - protein, 27 aa, Artificial Sequence
  Cyclic GFR-binding peptide
SNITIQIMDAANNVVLGEMSNDKQQII

SEQ ID NO: 97014 - protein, 27 aa, Artificial Sequence
  Cyclic GFR-binding peptide
SNITMQIMDNGRVLLLGEMSNDKQQII

SEQ ID NO: 97015 - protein, 27 aa, Artificial Sequence
  Cyclic GFR-binding peptide
SNITMQIMNDKQQIILGEMSNDKQQII

SEQ ID NO: 97016 - protein, 27 aa, Artificial Sequence
  Cyclic GFR-binding peptide
SNITIQIMDAANNVVIGEMSNDKQQII

SEQ ID NO: 97017 - protein, 27 aa, Artificial Sequence
  Cyclic GFR-binding peptide
SNITIQIMVGRTPKVLGEMSNDKQQII

SEQ ID NO: 97018 - protein, 27 aa, Artificial Sequence
  Cyclic GFR-binding peptide
NDKQQIIQYNKLVVNKNEDLYLISIAS

SEQ ID NO: 97019 - protein, 27 aa, Artificial Sequence
  Cyclic GFR-binding peptide
NDKQQIIQYNKLVVNNAADLYLISIAS

SEQ ID NO: 97020 - protein, 27 aa, Artificial Sequence
  Cyclic GFR-binding peptide
NDKQQIIQYNKLIIQQKDNLYLMSIAS

SEQ ID NO: 97021 - protein, 27 aa, Artificial Sequence
  Cyclic GFR-binding peptide
NDKQQIIQYNKLLLVRGNDLYLMSIAS

SEQ ID NO: 97022 - protein, 27 aa, Artificial Sequence
  Cyclic GFR-binding peptide
NDKQQIIQYNKLYTVVGKDLYLISIAS

SEQ ID NO: 97023 - protein, 27 aa, Artificial Sequence
  Cyclic GFR-binding peptide
SAISILYLDENKNVVLKNYQNDKQQII

SEQ ID NO: 97024 - protein, 27 aa, Artificial Sequence
  Cyclic GFR-binding peptide
SAISILYLDAANNVVLKNYQNDKQQII

SEQ ID NO: 97025 - protein, 27 aa, Artificial Sequence
  Cyclic GFR-binding peptide
SAISMLYLNDKQQIILKNYQNDKQQII

SEQ ID NO: 97026 - protein, 27 aa, Artificial Sequence
  Cyclic GFR-binding peptide
SAISMLYLDNGRVLLLKNYQNDKQQII

SEQ ID NO: 97027 - protein, 27 aa, Artificial Sequence
  Cyclic GFR-binding peptide
SAISILYLDKGVVTYLKNYQNDKQQII

SEQ ID NO: 97028 - protein, 27 aa, Artificial Sequence
  Cyclic GFR-binding peptide
DAANNVVRYKKLIKPTKGIFYLISIAN

SEQ ID NO: 97029 - protein, 29 aa, Artificial Sequence
  Cyclic GFR-binding peptide
DAANNVVRHKRLFIPKKRVIEYYLVSTAS

SEQ ID NO: 97030 - protein, 27 aa, Artificial Sequence
  Cyclic GFR-binding peptide
DAANNVVYHYKLVVKDYEDKYLMSIPS

SEQ ID NO: 97031 - protein, 27 aa, Artificial Sequence
  Cyclic GFR-binding peptide
DAANNVVQYNKLIVNNSSDLYLVSIAS

SEQ ID NO: 97032 - protein, 27 aa, Artificial Sequence
  Cyclic GFR-binding peptide
DAANNVVRYKKLVVKDYEDFYLMSIAN

SEQ ID NO: 97033 - protein, 27 aa, Artificial Sequence
  Cyclic GFR-binding peptide
DAANNVVRYKKLVKPTRGVFYLISIAN

SEQ ID NO: 97034 - protein, 27 aa, Artificial Sequence
  Cyclic GFR-binding peptide
DAANNVVRHKRLVVKENEDYYLMSTAS

SEQ ID NO: 97035 - protein, 27 aa, Artificial Sequence
  Cyclic GFR-binding peptide
DAANNVVYHYKLIKPTKGIKYLISIPS

SEQ ID NO: 97036 - protein, 29 aa, Artificial Sequence
  Cyclic GFR-binding peptide
DAANNVVRYKKLFIPKKRVIEFYLVSIAN

SEQ ID NO: 97037 - protein, 27 aa, Artificial Sequence
  Cyclic GFR-binding peptide
DAANNVVYHYKLVVKENEDKYLMSIPS

SEQ ID NO: 97038 - protein, 27 aa, Artificial Sequence
  Cyclic GFR-binding peptide
DAANNVVRHKRLVKPKRGVYYLISTAS

SEQ ID NO: 97039 - protein, 27 aa, Artificial Sequence
  Cyclic GFR-binding peptide
DAANNVVYHYKLVKPKRGVKYLISIPS

SEQ ID NO: 97040 - protein, 29 aa, Artificial Sequence
  Cyclic GFR-binding peptide
DAANNVVQYNKLFIPKKRVIELYLVSIAS

SEQ ID NO: 97041 - protein, 27 aa, Artificial Sequence
  Cyclic GFR-binding peptide
DAANNVVQYNKLVKPTRGVLYLISIAS

SEQ ID NO: 97042 - protein, 27 aa, Artificial Sequence
  Cyclic GFR-binding peptide
DAANNVVRYKKLVVKENEDFYLMSIAN

SEQ ID NO: 97043 - protein, 27 aa, Artificial Sequence
  Cyclic GFR-binding peptide
DAANNVVQYNKLTPVGMDDLYLVSIAS

SEQ ID NO: 97044 - protein, 27 aa, Artificial Sequence
  Cyclic GFR-binding peptide
DAANNVVRYKKLTPVGMDDFYLVSIAN

SEQ ID NO: 97045 - protein, 27 aa, Artificial Sequence
  Cyclic GFR-binding peptide
DAANNVVRYKKLVKPKRGVFYLISIAN

SEQ ID NO: 97046 - protein, 27 aa, Artificial Sequence
  Cyclic GFR-binding peptide
DAANNVVQYNKLVVKENEDLYLMSIAS

SEQ ID NO: 97047 - protein, 27 aa, Artificial Sequence
  Cyclic GFR-binding peptide
DAANNVVYHYKLIVNSSDDKYLVSIPS

SEQ ID NO: 97048 - protein, 27 aa, Artificial Sequence
  Cyclic GFR-binding peptide
DAANNVVQYNKLVKPKRGVLYLISIAS

SEQ ID NO: 97049 - protein, 27 aa, Artificial Sequence
  Cyclic GFR-binding peptide
DAANNVVRYKKLIVNNSSDFYLVSIAN

SEQ ID NO: 97050 - protein, 27 aa, Artificial Sequence
  Cyclic GFR-binding peptide
DAANNVVRYKKLIVNSSDDFYLVSIAN

SEQ ID NO: 97051 - protein, 27 aa, Artificial Sequence
  Cyclic GFR-binding peptide
DAANNVVRHKRLVKPTRGVYYLISTAS

SEQ ID NO: 97052 - protein, 29 aa, Artificial Sequence
  Cyclic GFR-binding peptide
DAANNVVYHYKLFIPKKRVIEKYLVSIPS

SEQ ID NO: 97053 - protein, 27 aa, Artificial Sequence
  Cyclic GFR-binding peptide
DAANNVVRHKRLIKPTKGIYYLISTAS

SEQ ID NO: 97054 - protein, 27 aa, Artificial Sequence
  Cyclic GFR-binding peptide
DAANNVVRHKRLTPVGMDDYYLVSTAS

SEQ ID NO: 97055 - protein, 27 aa, Artificial Sequence
  Cyclic GFR-binding peptide
DAANNVVYHYKLTPVGMDDKYLVSIPS

SEQ ID NO: 97056 - protein, 27 aa, Artificial Sequence
  Cyclic GFR-binding peptide
DAANNVVYHYKLIVNNSSDKYLVSIPS

SEQ ID NO: 97057 - protein, 27 aa, Artificial Sequence
  Cyclic GFR-binding peptide
DAANNVVRHKRLIVNNSSDYYLVSTAS

SEQ ID NO: 97058 - protein, 27 aa, Artificial Sequence
  Cyclic GFR-binding peptide
DAANNVVYHYKLVKPTRGVKYLISIPS

SEQ ID NO: 97059 - protein, 27 aa, Artificial Sequence
  Cyclic GFR-binding peptide
DAANNVVRHKRLIVNSSDDYYLVSTAS

SEQ ID NO: 97060 - protein, 27 aa, Artificial Sequence
  Cyclic GFR-binding peptide
DAANNVVRHKRLVVKDYEDYYLMSTAS

SEQ ID NO: 97061 - protein, 27 aa, Artificial Sequence
  Cyclic GFR-binding peptide
DAANNVVQYNKLIKPTKGILYLISIAS

SEQ ID NO: 97062 - protein, 27 aa, Artificial Sequence
  Cyclic GFR-binding peptide
DAANNVVQYNKLVVKDYEDLYLMSIAS

SEQ ID NO: 97063 - protein, 27 aa, Artificial Sequence
  Cyclic GFR-binding peptide
DAANNVVQYNKLIVNSSDDLYLVSIAS

SEQ ID NO: 97064 - protein, 27 aa, Artificial Sequence
  Cyclic GFR-binding peptide
NAISILYFIGKTPKILKKYRDAANNVV

SEQ ID NO: 97065 - protein, 29 aa, Artificial Sequence
  Cyclic GFR-binding peptide
SATSVLYYEIVRKKPIFLRKHRDAANNVV

SEQ ID NO: 97066 - protein, 27 aa, Artificial Sequence
  Cyclic GFR-binding peptide
SPISMLYKDEYDKVVLKYHYDAANNVV

SEQ ID NO: 97067 - protein, 27 aa, Artificial Sequence
  Cyclic GFR-binding peptide
SAISVLYLDSSNNVILKNYQDAANNVV

SEQ ID NO: 97068 - protein, 27 aa, Artificial Sequence
  Cyclic GFR-binding peptide
NAISMLYFDEYDKVVLKKYRDAANNVV

SEQ ID NO: 97069 - protein, 27 aa, Artificial Sequence
  Cyclic GFR-binding peptide
NAISILYFVGRTPKVLKKYRDAANNVV

SEQ ID NO: 97070 - protein, 27 aa, Artificial Sequence
  Cyclic GFR-binding peptide
SATSMLYYDENEKVVLRKHRDAANNVV

SEQ ID NO: 97071 - protein, 27 aa, Artificial Sequence
  Cyclic GFR-binding peptide
SPISILYKIGKTPKILKYHYDAANNVV

SEQ ID NO: 97072 - protein, 29 aa, Artificial Sequence
  Cyclic GFR-binding peptide
NAISVLYFEIVRKKPIFLKKYRDAANNVV

SEQ ID NO: 97073 - protein, 27 aa, Artificial Sequence
  Cyclic GFR-binding peptide
SPISMLYKDENEKVVLKYHYDAANNVV

SEQ ID NO: 97074 - protein, 27 aa, Artificial Sequence
  Cyclic GFR-binding peptide
SATSILYYVGRKPKVLRKHRDAANNVV

SEQ ID NO: 97075 - protein, 27 aa, Artificial Sequence
  Cyclic GFR-binding peptide
SPISILYKVGRKPKVLKYHYDAANNVV

SEQ ID NO: 97076 - protein, 29 aa, Artificial Sequence
  Cyclic GFR-binding peptide
SAISVLYLEIVRKKPIFLKNYQDAANNVV

SEQ ID NO: 97077 - protein, 27 aa, Artificial Sequence
  Cyclic GFR-binding peptide
SAISILYLVGRTPKVLKNYQDAANNVV

SEQ ID NO: 97078 - protein, 27 aa, Artificial Sequence
  Cyclic GFR-binding peptide
NAISMLYFDENEKVVLKKYRDAANNVV

SEQ ID NO: 97079 - protein, 27 aa, Artificial Sequence
  Cyclic GFR-binding peptide
SAISVLYLDDMGVPTLKNYQDAANNVV

SEQ ID NO: 97080 - protein, 27 aa, Artificial Sequence
  Cyclic GFR-binding peptide
NAISVLYFDDMGVPTLKKYRDAANNVV

SEQ ID NO: 97081 - protein, 27 aa, Artificial Sequence
  Cyclic GFR-binding peptide
NAISILYFVGRKPKVLKKYRDAANNVV

SEQ ID NO: 97082 - protein, 27 aa, Artificial Sequence
  Cyclic GFR-binding peptide
SAISMLYLDENEKVVLKNYQDAANNVV

SEQ ID NO: 97083 - protein, 27 aa, Artificial Sequence
  Cyclic GFR-binding peptide
SPISVLYKDDSSNVILKYHYDAANNVV

SEQ ID NO: 97084 - protein, 27 aa, Artificial Sequence
  Cyclic GFR-binding peptide
SAISILYLVGRKPKVLKNYQDAANNVV

SEQ ID NO: 97085 - protein, 27 aa, Artificial Sequence
  Cyclic GFR-binding peptide
NAISVLYFDSSNNVILKKYRDAANNVV

SEQ ID NO: 97086 - protein, 27 aa, Artificial Sequence
  Cyclic GFR-binding peptide
NAISVLYFDDSSNVILKKYRDAANNVV

SEQ ID NO: 97087 - protein, 27 aa, Artificial Sequence
  Cyclic GFR-binding peptide
SATSILYYVGRTPKVLRKHRDAANNVV

SEQ ID NO: 97088 - protein, 29 aa, Artificial Sequence
  Cyclic GFR-binding peptide
SPISVLYKEIVRKKPIFLKYHYDAANNVV

SEQ ID NO: 97089 - protein, 27 aa, Artificial Sequence
  Cyclic GFR-binding peptide
SATSILYYIGKTPKILRKHRDAANNVV

SEQ ID NO: 97090 - protein, 27 aa, Artificial Sequence
  Cyclic GFR-binding peptide
SATSVLYYDDMGVPTLRKHRDAANNVV

SEQ ID NO: 97091 - protein, 27 aa, Artificial Sequence
  Cyclic GFR-binding peptide
SPISVLYKDDMGVPTLKYHYDAANNVV

SEQ ID NO: 97092 - protein, 27 aa, Artificial Sequence
  Cyclic GFR-binding peptide
SPISVLYKDSSNNVILKYHYDAANNVV

SEQ ID NO: 97093 - protein, 27 aa, Artificial Sequence
  Cyclic GFR-binding peptide
SATSVLYYDSSNNVILRKHRDAANNVV

SEQ ID NO: 97094 - protein, 27 aa, Artificial Sequence
  Cyclic GFR-binding peptide
SPISILYKVGRTPKVLKYHYDAANNVV

SEQ ID NO: 97095 - protein, 27 aa, Artificial Sequence
  Cyclic GFR-binding peptide
SATSVLYYDDSSNVILRKHRDAANNVV

SEQ ID NO: 97096 - protein, 27 aa, Artificial Sequence
  Cyclic GFR-binding peptide
SATSMLYYDEYDKVVLRKHRDAANNVV

SEQ ID NO: 97097 - protein, 27 aa, Artificial Sequence
  Cyclic GFR-binding peptide
SAISILYLIGKTPKILKNYQDAANNVV

SEQ ID NO: 97098 - protein, 27 aa, Artificial Sequence
  Cyclic GFR-binding peptide
SAISMLYLDEYDKVVLKNYQDAANNVV

SEQ ID NO: 97099 - protein, 27 aa, Artificial Sequence
  Cyclic GFR-binding peptide
SAISVLYLDDSSNVILKNYQDAANNVV

SEQ ID NO: 97100 - protein, 27 aa, Artificial Sequence
  Cyclic GFR-binding peptide
DAANNVVNSLQEVVKDYEDYYLMTLPE

SEQ ID NO: 97101 - protein, 27 aa, Artificial Sequence
  Cyclic GFR-binding peptide
DAANNVVNSLQEIKPTKGIYYVIPLPE

SEQ ID NO: 97102 - protein, 27 aa, Artificial Sequence
  Cyclic GFR-binding peptide
DAANNVVNSLQEVKPKRGVYYLITLPE

SEQ ID NO: 97103 - protein, 27 aa, Artificial Sequence
  Cyclic GFR-binding peptide
DAANNVVNSLQEVKPTRGVYYVIPLPE

SEQ ID NO: 97104 - protein, 27 aa, Artificial Sequence
  Cyclic GFR-binding peptide
DAANNVVEYQKYIVNSSDDIFLVSIPS

SEQ ID NO: 97105 - protein, 27 aa, Artificial Sequence
  Cyclic GFR-binding peptide
DAANNVVEYQKYVKPTRGVIFLISIPS

SEQ ID NO: 97106 - protein, 27 aa, Artificial Sequence
  Cyclic GFR-binding peptide
DAANNVVNSLQEVVKENEDYYLMTLPE

SEQ ID NO: 97107 - protein, 27 aa, Artificial Sequence
  Cyclic GFR-binding peptide
DAANNVVNSLQEVVNNASDYYLITLPE

SEQ ID NO: 97108 - protein, 27 aa, Artificial Sequence
  Cyclic GFR-binding peptide
DAANNVVNSLQEVKPKRGVYYVIPLPE

SEQ ID NO: 97109 - protein, 27 aa, Artificial Sequence
  Cyclic GFR-binding peptide
DAANNVVNSLQEVVNNASDYYVIPLPE

SEQ ID NO: 97110 - protein, 27 aa, Artificial Sequence
  Cyclic GFR-binding peptide
DAANNVVNSLQEVKPTRGVYYLITLPE

SEQ ID NO: 97111 - protein, 27 aa, Artificial Sequence
  Cyclic GFR-binding peptide
DAANNVVEYQKYIKPTKGIIFLISIPS

SEQ ID NO: 97112 - protein, 27 aa, Artificial Sequence
  Cyclic GFR-binding peptide
DAANNVVEYQKYVVNNASDIFLISIPS

SEQ ID NO: 97113 - protein, 27 aa, Artificial Sequence
  Cyclic GFR-binding peptide
DAANNVVNSLQEIVNSSDDYYVVPLPE

SEQ ID NO: 97114 - protein, 27 aa, Artificial Sequence
  Cyclic GFR-binding peptide
DAANNVVNSLQEVVKDYEDYYVMPLPE

SEQ ID NO: 97115 - protein, 27 aa, Artificial Sequence
  Cyclic GFR-binding peptide
DAANNVVEYQKYVVKENEDIFLMSIPS

SEQ ID NO: 97116 - protein, 27 aa, Artificial Sequence
  Cyclic GFR-binding peptide
DAANNVVNSLQEVVKENEDYYVMPLPE

SEQ ID NO: 97117 - protein, 27 aa, Artificial Sequence
  Cyclic GFR-binding peptide
DAANNVVEYQKYVVKDYEDIFLMSIPS

SEQ ID NO: 97118 - protein, 27 aa, Artificial Sequence
  Cyclic GFR-binding peptide
DAANNVVQYNKLVVNNASDLYLISIAS

SEQ ID NO: 97119 - protein, 27 aa, Artificial Sequence
  Cyclic GFR-binding peptide
DAANNVVNSLQEIKPTKGIYYLITLPE

SEQ ID NO: 97120 - protein, 27 aa, Artificial Sequence
  Cyclic GFR-binding peptide
DAANNVVEYQKYVKPKRGVIFLISIPS

SEQ ID NO: 97121 - protein, 27 aa, Artificial Sequence
  Cyclic GFR-binding peptide
DAANNVVRYKKLVVNNASDFYLISIAN

SEQ ID NO: 97122 - protein, 27 aa, Artificial Sequence
  Cyclic GFR-binding peptide
DAANNVVNSLQEIVNSSDDYYLVTLPE

SEQ ID NO: 97123 - protein, 27 aa, Artificial Sequence
  Cyclic GFR-binding peptide
EPLTMLYYDEYDKVVEQLSNDAANNVV

SEQ ID NO: 97124 - protein, 27 aa, Artificial Sequence
  Cyclic GFR-binding peptide
EPLPIVYYIGKTPKIEQLSNDAANNVV

SEQ ID NO: 97125 - protein, 27 aa, Artificial Sequence
  Cyclic GFR-binding peptide
EPLTILYYVGRKPKVEQLSNDAANNVV

SEQ ID NO: 97126 - protein, 27 aa, Artificial Sequence
  Cyclic GFR-binding peptide
EPLPIVYYVGRTPKVEQLSNDAANNVV

SEQ ID NO: 97127 - protein, 27 aa, Artificial Sequence
  Cyclic GFR-binding peptide
SPISVLFIDDSSNVIYKQYEDAANNVV

SEQ ID NO: 97128 - protein, 27 aa, Artificial Sequence
  Cyclic GFR-binding peptide
SPISILFIVGRTPKVYKQYEDAANNVV

SEQ ID NO: 97129 - protein, 27 aa, Artificial Sequence
  Cyclic GFR-binding peptide
EPLTMLYYDENEKVVEQLSNDAANNVV

SEQ ID NO: 97130 - protein, 27 aa, Artificial Sequence
  Cyclic GFR-binding peptide
EPLTILYYDSANNVVEQLSNDAANNVV

SEQ ID NO: 97131 - protein, 27 aa, Artificial Sequence
  Cyclic GFR-binding peptide
EPLPIVYYVGRKPKVEQLSNDAANNVV

SEQ ID NO: 97132 - protein, 27 aa, Artificial Sequence
  Cyclic GFR-binding peptide
EPLPIVYYDSANNVVEQLSNDAANNVV

SEQ ID NO: 97133 - protein, 27 aa, Artificial Sequence
  Cyclic GFR-binding peptide
EPLTILYYVGRTPKVEQLSNDAANNVV

SEQ ID NO: 97134 - protein, 27 aa, Artificial Sequence
  Cyclic GFR-binding peptide
SPISILFIIGKTPKIYKQYEDAANNVV

SEQ ID NO: 97135 - protein, 27 aa, Artificial Sequence
  Cyclic GFR-binding peptide
SPISILFIDSANNVVYKQYEDAANNVV

SEQ ID NO: 97136 - protein, 27 aa, Artificial Sequence
  Cyclic GFR-binding peptide
EPLPVVYYDDSSNVIEQLSNDAANNVV

SEQ ID NO: 97137 - protein, 27 aa, Artificial Sequence
  Cyclic GFR-binding peptide
EPLPMVYYDEYDKVVEQLSNDAANNVV

SEQ ID NO: 97138 - protein, 27 aa, Artificial Sequence
  Cyclic GFR-binding peptide
SPISMLFIDENEKVVYKQYEDAANNVV

SEQ ID NO: 97139 - protein, 27 aa, Artificial Sequence
  Cyclic GFR-binding peptide
EPLPMVYYDENEKVVEQLSNDAANNVV

SEQ ID NO: 97140 - protein, 27 aa, Artificial Sequence
  Cyclic GFR-binding peptide
SPISMLFIDEYDKVVYKQYEDAANNVV

SEQ ID NO: 97141 - protein, 27 aa, Artificial Sequence
  Cyclic GFR-binding peptide
SAISILYLDSANNVVLKNYQDAANNVV

SEQ ID NO: 97142 - protein, 27 aa, Artificial Sequence
  Cyclic GFR-binding peptide
EPLTILYYIGKTPKIEQLSNDAANNVV

SEQ ID NO: 97143 - protein, 27 aa, Artificial Sequence
  Cyclic GFR-binding peptide
SPISILFIVGRKPKVYKQYEDAANNVV

SEQ ID NO: 97144 - protein, 27 aa, Artificial Sequence
  Cyclic GFR-binding peptide
NAISILYFDSANNVVLKKYRDAANNVV

SEQ ID NO: 97145 - protein, 27 aa, Artificial Sequence
  Cyclic GFR-binding peptide
EPLTVLYYDDSSNVIEQLSNDAANNVV

SEQ ID NO: 97146 - protein, 29 aa, Artificial Sequence
  Cyclic GFR-binding peptide
DAANNVVVTAKKLKPKKRVYEIKRVQVPR

SEQ ID NO: 97147 - protein, 29 aa, Artificial Sequence
  Cyclic GFR-binding peptide
DAANNVVVQVEKLKPKKRVYEVKAVKVSR

SEQ ID NO: 97148 - protein, 29 aa, Artificial Sequence
  Cyclic GFR-binding peptide
DAANNVVVQVEKFIPKKRVIEVKAVKVSR

SEQ ID NO: 97149 - protein, 29 aa, Artificial Sequence
  Cyclic GFR-binding peptide
DAANNVVVQVEKHQGQHPKIRVKAMKVSR

SEQ ID NO: 97150 - protein, 29 aa, Artificial Sequence
  Cyclic GFR-binding peptide
DAANNVVVTAKKHQGQHPKIRIKRMQVPR

SEQ ID NO: 97151 - protein, 29 aa, Artificial Sequence
  Cyclic GFR-binding peptide
DAANNVVSMEGLLKPKKRVYEMIQVTINS

SEQ ID NO: 97152 - protein, 29 aa, Artificial Sequence
  Cyclic GFR-binding peptide
DAANNVVSMEGIFIPKKRVIEMIQVTINS

SEQ ID NO: 97153 - protein, 29 aa, Artificial Sequence
  Cyclic GFR-binding peptide
DAANNVVSMEGLHQGQHPKIRMIQMTINS

SEQ ID NO: 97154 - protein, 29 aa, Artificial Sequence
  Cyclic GFR-binding peptide
DAANNVVSMEGILKPKKRVYEMIQVTINS

SEQ ID NO: 97155 - protein, 29 aa, Artificial Sequence
  Cyclic GFR-binding peptide
DAANNVVSMEGLFIPKKRVIEMIQVTINS

SEQ ID NO: 97156 - protein, 29 aa, Artificial Sequence
  Cyclic GFR-binding peptide
DAANNVVVTAKKFIPKKRVIEIKRVQVPR

SEQ ID NO: 97157 - protein, 29 aa, Artificial Sequence
  Cyclic GFR-binding peptide
DAANNVVSMEGIHQGQHPKIRMIQMTINS

SEQ ID NO: 97158 - protein, 29 aa, Artificial Sequence
  Cyclic GFR-binding peptide
RPVQVRKIEYVRKKPKLKKATVDAANNVV

SEQ ID NO: 97159 - protein, 29 aa, Artificial Sequence
  Cyclic GFR-binding peptide
RSVKVAKVEYVRKKPKLKEVQVDAANNVV

SEQ ID NO: 97160 - protein, 29 aa, Artificial Sequence
  Cyclic GFR-binding peptide
RSVKVAKVEIVRKKPIFKEVQVDAANNVV

SEQ ID NO: 97161 - protein, 29 aa, Artificial Sequence
  Cyclic GFR-binding peptide
RSVKMAKVRIKPHQGQHKEVQVDAANNVV

SEQ ID NO: 97162 - protein, 29 aa, Artificial Sequence
  Cyclic GFR-binding peptide
RPVQMRKIRIKPHQGQHKKATVDAANNVV

SEQ ID NO: 97163 - protein, 29 aa, Artificial Sequence
  Cyclic GFR-binding peptide
SNITVQIMEYVRKKPKLLGEMSDAANNVV

SEQ ID NO: 97164 - protein, 29 aa, Artificial Sequence
  Cyclic GFR-binding peptide
SNITVQIMEIVRKKPIFIGEMSDAANNVV

SEQ ID NO: 97165 - protein, 29 aa, Artificial Sequence
  Cyclic GFR-binding peptide
SNITMQIMRIKPHQGQHLGEMSDAANNVV

SEQ ID NO: 97166 - protein, 29 aa, Artificial Sequence
  Cyclic GFR-binding peptide
SNITVQIMEYVRKKPKLIGEMSDAANNVV

SEQ ID NO: 97167 - protein, 29 aa, Artificial Sequence
  Cyclic GFR-binding peptide
SNITVQIMEIVRKKPIFLGEMSDAANNVV

SEQ ID NO: 97168 - protein, 29 aa, Artificial Sequence
  Cyclic GFR-binding peptide
RPVQVRKIEIVRKKPIFKKATVDAANNVV

SEQ ID NO: 97169 - protein, 29 aa, Artificial Sequence
  Cyclic GFR-binding peptide
SNITMQIMRIKPHQGQHIGEMSDAANNVV

SEQ ID NO: 97170 - protein, 27 aa, Artificial Sequence
  Cyclic GFR-binding peptide
DAANNVVEYKFKVKPTRGVLYLISIPE

SEQ ID NO: 97171 - protein, 27 aa, Artificial Sequence
  Cyclic GFR-binding peptide
DAANNVVEYKFKTPVGMDDLYLVSIPE

SEQ ID NO: 97172 - protein, 27 aa, Artificial Sequence
  Cyclic GFR-binding peptide
DAANNVVEYQKYVKPKRGVIYLISIPS

SEQ ID NO: 97173 - protein, 27 aa, Artificial Sequence
  Cyclic GFR-binding peptide
DAANNVVEYQKYVVKDYEDIYLMSIPS

SEQ ID NO: 97174 - protein, 27 aa, Artificial Sequence
  Cyclic GFR-binding peptide
DAANNVVEYKFKIKPTKGILYLISIPE

SEQ ID NO: 97175 - protein, 27 aa, Artificial Sequence
  Cyclic GFR-binding peptide
DAANNVVYHYKLYTVVGKDKYLISIPS

SEQ ID NO: 97176 - protein, 27 aa, Artificial Sequence
  Cyclic GFR-binding peptide
DAANNVVRYKKLYTVVGKDFYLISIAN

SEQ ID NO: 97177 - protein, 27 aa, Artificial Sequence
  Cyclic GFR-binding peptide
DAANNVVEYQKYVVNNAADIYLISIPS

SEQ ID NO: 97178 - protein, 27 aa, Artificial Sequence
  Cyclic GFR-binding peptide
DAANNVVEYQKYVKPTRGVIYLISIPS

SEQ ID NO: 97179 - protein, 27 aa, Artificial Sequence
  Cyclic GFR-binding peptide
DAANNVVEYQKYTPVGMDDIYLVSIPS

SEQ ID NO: 97180 - protein, 27 aa, Artificial Sequence
  Cyclic GFR-binding peptide
DAANNVVEYKFKVVKDYEDLYLMSIPE

SEQ ID NO: 97181 - protein, 27 aa, Artificial Sequence
  Cyclic GFR-binding peptide
DAANNVVEYKFKVVNNAADLYLISIPE

SEQ ID NO: 97182 - protein, 27 aa, Artificial Sequence
  Cyclic GFR-binding peptide
DAANNVVEYQKYVVKENEDIYLMSIPS

SEQ ID NO: 97183 - protein, 27 aa, Artificial Sequence
  Cyclic GFR-binding peptide
DAANNVVEYQKYIKPTKGIIYLISIPS

SEQ ID NO: 97184 - protein, 27 aa, Artificial Sequence
  Cyclic GFR-binding peptide
DAANNVVRYKKLVVNNAADFYLISIAN

SEQ ID NO: 97185 - protein, 27 aa, Artificial Sequence
  Cyclic GFR-binding peptide
DAANNVVYHYKLVVNNAADKYLISIPS

SEQ ID NO: 97186 - protein, 27 aa, Artificial Sequence
  Cyclic GFR-binding peptide
DAANNVVEYKFKIVNNSSDLYLVSIPE

SEQ ID NO: 97187 - protein, 27 aa, Artificial Sequence
  Cyclic GFR-binding peptide
DAANNVVEYQKYIVNSSDDIYLVSIPS

SEQ ID NO: 97188 - protein, 27 aa, Artificial Sequence
  Cyclic GFR-binding peptide
DAANNVVEYKFKIVNSSDDLYLVSIPE

SEQ ID NO: 97189 - protein, 27 aa, Artificial Sequence
  Cyclic GFR-binding peptide
DAANNVVEYKFKVKPKRGVLYLISIPE

SEQ ID NO: 97190 - protein, 27 aa, Artificial Sequence
  Cyclic GFR-binding peptide
DAANNVVEYQKYYTVVGKDIYLISIPS

SEQ ID NO: 97191 - protein, 27 aa, Artificial Sequence
  Cyclic GFR-binding peptide
DAANNVVEYKFKVVKENEDLYLMSIPE

SEQ ID NO: 97192 - protein, 27 aa, Artificial Sequence
  Cyclic GFR-binding peptide
DAANNVVEYQKYIVNNSSDIYLVSIPS

SEQ ID NO: 97193 - protein, 27 aa, Artificial Sequence
  Cyclic GFR-binding peptide
DAANNVVEYKFKYTVVGKDLYLISIPE

SEQ ID NO: 97194 - protein, 27 aa, Artificial Sequence
  Cyclic GFR-binding peptide
EPISILYLVGRTPKVKFKYEDAANNVV

SEQ ID NO: 97195 - protein, 27 aa, Artificial Sequence
  Cyclic GFR-binding peptide
EPISVLYLDDMGVPTKFKYEDAANNVV

SEQ ID NO: 97196 - protein, 27 aa, Artificial Sequence
  Cyclic GFR-binding peptide
SPISILYIVGRKPKVYKQYEDAANNVV

SEQ ID NO: 97197 - protein, 27 aa, Artificial Sequence
  Cyclic GFR-binding peptide
SPISMLYIDEYDKVVYKQYEDAANNVV

SEQ ID NO: 97198 - protein, 27 aa, Artificial Sequence
  Cyclic GFR-binding peptide
EPISILYLIGKTPKIKFKYEDAANNVV

SEQ ID NO: 97199 - protein, 27 aa, Artificial Sequence
  Cyclic GFR-binding peptide
SPISILYKDKGVVTYLKYHYDAANNVV

SEQ ID NO: 97200 - protein, 27 aa, Artificial Sequence
  Cyclic GFR-binding peptide
NAISILYFDKGVVTYLKKYRDAANNVV

SEQ ID NO: 97201 - protein, 27 aa, Artificial Sequence
  Cyclic GFR-binding peptide
SPISILYIDAANNVVYKQYEDAANNVV

SEQ ID NO: 97202 - protein, 27 aa, Artificial Sequence
  Cyclic GFR-binding peptide
SPISILYIVGRTPKVYKQYEDAANNVV

SEQ ID NO: 97203 - protein, 27 aa, Artificial Sequence
  Cyclic GFR-binding peptide
SPISVLYIDDMGVPTYKQYEDAANNVV

SEQ ID NO: 97204 - protein, 27 aa, Artificial Sequence
  Cyclic GFR-binding peptide
EPISMLYLDEYDKVVKFKYEDAANNVV

SEQ ID NO: 97205 - protein, 27 aa, Artificial Sequence
  Cyclic GFR-binding peptide
EPISILYLDAANNVVKFKYEDAANNVV

SEQ ID NO: 97206 - protein, 27 aa, Artificial Sequence
  Cyclic GFR-binding peptide
SPISMLYIDENEKVVYKQYEDAANNVV

SEQ ID NO: 97207 - protein, 27 aa, Artificial Sequence
  Cyclic GFR-binding peptide
SPISILYIIGKTPKIYKQYEDAANNVV

SEQ ID NO: 97208 - protein, 27 aa, Artificial Sequence
  Cyclic GFR-binding peptide
NAISILYFDAANNVVLKKYRDAANNVV

SEQ ID NO: 97209 - protein, 27 aa, Artificial Sequence
  Cyclic GFR-binding peptide
SPISILYKDAANNVVLKYHYDAANNVV

SEQ ID NO: 97210 - protein, 27 aa, Artificial Sequence
  Cyclic GFR-binding peptide
EPISVLYLDSSNNVIKFKYEDAANNVV

SEQ ID NO: 97211 - protein, 27 aa, Artificial Sequence
  Cyclic GFR-binding peptide
SPISVLYIDDSSNVIYKQYEDAANNVV

SEQ ID NO: 97212 - protein, 27 aa, Artificial Sequence
  Cyclic GFR-binding peptide
EPISVLYLDDSSNVIKFKYEDAANNVV

SEQ ID NO: 97213 - protein, 27 aa, Artificial Sequence
  Cyclic GFR-binding peptide
EPISILYLVGRKPKVKFKYEDAANNVV

SEQ ID NO: 97214 - protein, 27 aa, Artificial Sequence
  Cyclic GFR-binding peptide
SPISILYIDKGVVTYYKQYEDAANNVV

SEQ ID NO: 97215 - protein, 27 aa, Artificial Sequence
  Cyclic GFR-binding peptide
EPISMLYLDENEKVVKFKYEDAANNVV

SEQ ID NO: 97216 - protein, 27 aa, Artificial Sequence
  Cyclic GFR-binding peptide
SPISVLYIDSSNNVIYKQYEDAANNVV

SEQ ID NO: 97217 - protein, 27 aa, Artificial Sequence
  Cyclic GFR-binding peptide
EPISILYLDKGVVTYKFKYEDAANNVV

SEQ ID NO: 97218 - protein, 27 aa, Artificial Sequence
  Cyclic GFR-binding peptide
DAANNVVPIKGYIIQQKDNFYLMNIPS

SEQ ID NO: 97219 - protein, 27 aa, Artificial Sequence
  Cyclic GFR-binding peptide
DAANNVVPIKGYVVKDYEDFYLMNIPS

SEQ ID NO: 97220 - protein, 27 aa, Artificial Sequence
  Cyclic GFR-binding peptide
DAANNVVPIKGYIVNSSDDFYLVNIPS

SEQ ID NO: 97221 - protein, 27 aa, Artificial Sequence
  Cyclic GFR-binding peptide
DAANNVVPIKGYVVNNAADFYLINIPS

SEQ ID NO: 97222 - protein, 27 aa, Artificial Sequence
  Cyclic GFR-binding peptide
DAANNVVPIKGYYTVVGKDFYLINIPS

SEQ ID NO: 97223 - protein, 27 aa, Artificial Sequence
  Cyclic GFR-binding peptide
DAANNVVPIKGYLLVRGNDFYLMNIPS

SEQ ID NO: 97224 - protein, 27 aa, Artificial Sequence
  Cyclic GFR-binding peptide
DAANNVVPIKGYVVKENEDFYLMNIPS

SEQ ID NO: 97225 - protein, 27 aa, Artificial Sequence
  Cyclic GFR-binding peptide
DAANNVVPIKGYVVNNASDFYLINIPS

SEQ ID NO: 97226 - protein, 27 aa, Artificial Sequence
  Cyclic GFR-binding peptide
DAANNVVPIKGYTPVGMDDFYLVNIPS

SEQ ID NO: 97227 - protein, 27 aa, Artificial Sequence
  Cyclic GFR-binding peptide
DAANNVVPIKGYIVNNSSDFYLVNIPS

SEQ ID NO: 97228 - protein, 27 aa, Artificial Sequence
  Cyclic GFR-binding peptide
SPINMLYFNDKQQIIYGKIPDAANNVV

SEQ ID NO: 97229 - protein, 27 aa, Artificial Sequence
  Cyclic GFR-binding peptide
SPINMLYFDEYDKVVYGKIPDAANNVV

SEQ ID NO: 97230 - protein, 27 aa, Artificial Sequence
  Cyclic GFR-binding peptide
SPINVLYFDDSSNVIYGKIPDAANNVV

SEQ ID NO: 97231 - protein, 27 aa, Artificial Sequence
  Cyclic GFR-binding peptide
SPINILYFDAANNVVYGKIPDAANNVV

SEQ ID NO: 97232 - protein, 27 aa, Artificial Sequence
  Cyclic GFR-binding peptide
SPINILYFDKGVVTYYGKIPDAANNVV

SEQ ID NO: 97233 - protein, 27 aa, Artificial Sequence
  Cyclic GFR-binding peptide
SPINMLYFDNGRVLLYGKIPDAANNVV

SEQ ID NO: 97234 - protein, 27 aa, Artificial Sequence
  Cyclic GFR-binding peptide
SPINMLYFDENEKVVYGKIPDAANNVV

SEQ ID NO: 97235 - protein, 27 aa, Artificial Sequence
  Cyclic GFR-binding peptide
SPINILYFDSANNVVYGKIPDAANNVV

SEQ ID NO: 97236 - protein, 27 aa, Artificial Sequence
  Cyclic GFR-binding peptide
SPINVLYFDDMGVPTYGKIPDAANNVV

SEQ ID NO: 97237 - protein, 27 aa, Artificial Sequence
  Cyclic GFR-binding peptide
SPINVLYFDSSNNVIYGKIPDAANNVV

SEQ ID NO: 97238 - protein, 27 aa, Artificial Sequence
  Cyclic GFR-binding peptide
DAANNVVEYQKYVVNNASDIYLISIPS

SEQ ID NO: 97239 - protein, 27 aa, Artificial Sequence
  Cyclic GFR-binding peptide
DAANNVVEYQKYIIQQKDNIYLMSIPS

SEQ ID NO: 97240 - protein, 27 aa, Artificial Sequence
  Cyclic GFR-binding peptide
DAANNVVEYQKYLLVRGNDIYLMSIPS

SEQ ID NO: 97241 - protein, 27 aa, Artificial Sequence
  Cyclic GFR-binding peptide
SPISILYIDSANNVVYKQYEDAANNVV

SEQ ID NO: 97242 - protein, 27 aa, Artificial Sequence
  Cyclic GFR-binding peptide
SPISMLYINDKQQIIYKQYEDAANNVV

SEQ ID NO: 97243 - protein, 27 aa, Artificial Sequence
  Cyclic GFR-binding peptide
SPISMLYIDNGRVLLYKQYEDAANNVV

SEQ ID NO: 97244 - protein, 27 aa, Artificial Sequence
  Cyclic GFR-binding peptide
DAANNVVPYVKLYTVVGKDFFLISLSS

SEQ ID NO: 97245 - protein, 27 aa, Artificial Sequence
  Cyclic GFR-binding peptide
DAANNVVPYVKLIKPTKGIFFLISLSS

SEQ ID NO: 97246 - protein, 27 aa, Artificial Sequence
  Cyclic GFR-binding peptide
DAANNVVPYVKLIIQQKDNFFLMSLSS

SEQ ID NO: 97247 - protein, 27 aa, Artificial Sequence
  Cyclic GFR-binding peptide
DAANNVVPYVKLIVNSSDDFFLVSLSS

SEQ ID NO: 97248 - protein, 27 aa, Artificial Sequence
  Cyclic GFR-binding peptide
DAANNVVPYVKLVKPKRGVFFLISLSS

SEQ ID NO: 97249 - protein, 27 aa, Artificial Sequence
  Cyclic GFR-binding peptide
DAANNVVPYVKLVKPTRGVFFLISLSS

SEQ ID NO: 97250 - protein, 27 aa, Artificial Sequence
  Cyclic GFR-binding peptide
DAANNVVPYVKLTPVGMDDFFLVSLSS

SEQ ID NO: 97251 - protein, 29 aa, Artificial Sequence
  Cyclic GFR-binding peptide
DAANNVVPYVKLHQGQHPKIRFFLMSLSS

SEQ ID NO: 97252 - protein, 27 aa, Artificial Sequence
  Cyclic GFR-binding peptide
DAANNVVPYVKLVVNKNEDFFLISLSS

SEQ ID NO: 97253 - protein, 27 aa, Artificial Sequence
  Cyclic GFR-binding peptide
DAANNVVPYVKLVVNNASDFFLISLSS

SEQ ID NO: 97254 - protein, 27 aa, Artificial Sequence
  Cyclic GFR-binding peptide
DAANNVVPYVKLVVKENEDFFLMSLSS

SEQ ID NO: 97255 - protein, 27 aa, Artificial Sequence
  Cyclic GFR-binding peptide
DAANNVVPYVKLIVNNSSDFFLVSLSS

SEQ ID NO: 97256 - protein, 29 aa, Artificial Sequence
  Cyclic GFR-binding peptide
DAANNVVPYVKLLKPKKRVYEFFLVSLSS

SEQ ID NO: 97257 - protein, 27 aa, Artificial Sequence
  Cyclic GFR-binding peptide
DAANNVVPYVKLLLVRGNDFFLMSLSS

SEQ ID NO: 97258 - protein, 27 aa, Artificial Sequence
  Cyclic GFR-binding peptide
DAANNVVPYVKLVVKDYEDFFLMSLSS

SEQ ID NO: 97259 - protein, 27 aa, Artificial Sequence
  Cyclic GFR-binding peptide
DAANNVVPYVKLVVNNAADFFLISLSS

SEQ ID NO: 97260 - protein, 27 aa, Artificial Sequence
  Cyclic GFR-binding peptide
SSLSILFFDKGVVTYLKVYPDAANNVV

SEQ ID NO: 97261 - protein, 27 aa, Artificial Sequence
  Cyclic GFR-binding peptide
SSLSILFFIGKTPKILKVYPDAANNVV

SEQ ID NO: 97262 - protein, 27 aa, Artificial Sequence
  Cyclic GFR-binding peptide
SSLSMLFFNDKQQIILKVYPDAANNVV

SEQ ID NO: 97263 - protein, 27 aa, Artificial Sequence
  Cyclic GFR-binding peptide
SSLSVLFFDDSSNVILKVYPDAANNVV

SEQ ID NO: 97264 - protein, 27 aa, Artificial Sequence
  Cyclic GFR-binding peptide
SSLSILFFVGRKPKVLKVYPDAANNVV

SEQ ID NO: 97265 - protein, 27 aa, Artificial Sequence
  Cyclic GFR-binding peptide
SSLSILFFVGRTPKVLKVYPDAANNVV

SEQ ID NO: 97266 - protein, 27 aa, Artificial Sequence
  Cyclic GFR-binding peptide
SSLSVLFFDDMGVPTLKVYPDAANNVV

SEQ ID NO: 97267 - protein, 29 aa, Artificial Sequence
  Cyclic GFR-binding peptide
SSLSMLFFRIKPHQGQHLKVYPDAANNVV

SEQ ID NO: 97268 - protein, 27 aa, Artificial Sequence
  Cyclic GFR-binding peptide
SSLSILFFDENKNVVLKVYPDAANNVV

SEQ ID NO: 97269 - protein, 27 aa, Artificial Sequence
  Cyclic GFR-binding peptide
SSLSILFFDSANNVVLKVYPDAANNVV

SEQ ID NO: 97270 - protein, 27 aa, Artificial Sequence
  Cyclic GFR-binding peptide
SSLSMLFFDENEKVVLKVYPDAANNVV

SEQ ID NO: 97271 - protein, 27 aa, Artificial Sequence
  Cyclic GFR-binding peptide
SSLSVLFFDSSNNVILKVYPDAANNVV

SEQ ID NO: 97272 - protein, 29 aa, Artificial Sequence
  Cyclic GFR-binding peptide
SSLSVLFFEYVRKKPKLLKVYPDAANNVV

SEQ ID NO: 97273 - protein, 27 aa, Artificial Sequence
  Cyclic GFR-binding peptide
SSLSMLFFDNGRVLLLKVYPDAANNVV

SEQ ID NO: 97274 - protein, 27 aa, Artificial Sequence
  Cyclic GFR-binding peptide
SSLSMLFFDEYDKVVLKVYPDAANNVV

SEQ ID NO: 97275 - protein, 27 aa, Artificial Sequence
  Cyclic GFR-binding peptide
SSLSILFFDAANNVVLKVYPDAANNVV

SEQ ID NO: 97276 - protein, 27 aa, Artificial Sequence
  Cyclic GFR-binding peptide
DAANNVVSMEGIIVNSSDDMIQVTINS

SEQ ID NO: 97277 - protein, 27 aa, Artificial Sequence
  Cyclic GFR-binding peptide
DAANNVVVTAKKVVKENEDIKRMQVPR

SEQ ID NO: 97278 - protein, 27 aa, Artificial Sequence
  Cyclic GFR-binding peptide
DAANNVVSMEGIVVKDYEDMIQMTINS

SEQ ID NO: 97279 - protein, 27 aa, Artificial Sequence
  Cyclic GFR-binding peptide
DAANNVVVTAKKIKPTKGIIKRIQVPR

SEQ ID NO: 97280 - protein, 27 aa, Artificial Sequence
  Cyclic GFR-binding peptide
DAANNVVSMEGIVKPTRGVMIQITINS

SEQ ID NO: 97281 - protein, 29 aa, Artificial Sequence
  Cyclic GFR-binding peptide
DAANNVVNSLQEFIPKKRVIEYYVVPLPE

SEQ ID NO: 97282 - protein, 27 aa, Artificial Sequence
  Cyclic GFR-binding peptide
DAANNVVVQVEKVKPKRGVVKAIKVSR

SEQ ID NO: 97283 - protein, 27 aa, Artificial Sequence
  Cyclic GFR-binding peptide
DAANNVVVQVEKVVKENEDVKAMKVSR

SEQ ID NO: 97284 - protein, 27 aa, Artificial Sequence
  Cyclic GFR-binding peptide
DAANNVVVTAKKIVNSSDDIKRVQVPR

SEQ ID NO: 97285 - protein, 27 aa, Artificial Sequence
  Cyclic GFR-binding peptide
DAANNVVVQVEKIKPTKGIVKAIKVSR

SEQ ID NO: 97286 - protein, 29 aa, Artificial Sequence
  Cyclic GFR-binding peptide
DAANNVVNSLQEFIPKKRVIEYYLVTLPE

SEQ ID NO: 97287 - protein, 27 aa, Artificial Sequence
  Cyclic GFR-binding peptide
DAANNVVVQVEKIVNSSDDVKAVKVSR

SEQ ID NO: 97288 - protein, 27 aa, Artificial Sequence
  Cyclic GFR-binding peptide
DAANNVVVTAKKVKPKRGVIKRIQVPR

SEQ ID NO: 97289 - protein, 27 aa, Artificial Sequence
  Cyclic GFR-binding peptide
DAANNVVVQVEKVKPTRGVVKAIKVSR

SEQ ID NO: 97290 - protein, 27 aa, Artificial Sequence
  Cyclic GFR-binding peptide
DAANNVVVTAKKVKPTRGVIKRIQVPR

SEQ ID NO: 97291 - protein, 29 aa, Artificial Sequence
  Cyclic GFR-binding peptide
DAANNVVNSLQELKPKKRVYEYYLVTLPE

SEQ ID NO: 97292 - protein, 27 aa, Artificial Sequence
  Cyclic GFR-binding peptide
DAANNVVSMEGIVKPKRGVMIQITINS

SEQ ID NO: 97293 - protein, 27 aa, Artificial Sequence
  Cyclic GFR-binding peptide
DAANNVVSMEGIVVKENEDMIQMTINS

SEQ ID NO: 97294 - protein, 27 aa, Artificial Sequence
  Cyclic GFR-binding peptide
DAANNVVSMEGIIKPTKGIMIQITINS

SEQ ID NO: 97295 - protein, 29 aa, Artificial Sequence
  Cyclic GFR-binding peptide
DAANNVVNSLQEHQGQHPKIRYYLMTLPE

SEQ ID NO: 97296 - protein, 27 aa, Artificial Sequence
  Cyclic GFR-binding peptide
DAANNVVVTAKKVVKDYEDIKRMQVPR

SEQ ID NO: 97297 - protein, 29 aa, Artificial Sequence
  Cyclic GFR-binding peptide
DAANNVVNSLQEHQGQHPKIRYYVMPLPE

SEQ ID NO: 97298 - protein, 29 aa, Artificial Sequence
  Cyclic GFR-binding peptide
DAANNVVNSLQELKPKKRVYEYYVVPLPE

SEQ ID NO: 97299 - protein, 27 aa, Artificial Sequence
  Cyclic GFR-binding peptide
DAANNVVVQVEKVVKDYEDVKAMKVSR

SEQ ID NO: 97300 - protein, 27 aa, Artificial Sequence
  Cyclic GFR-binding peptide
SNITVQIMDDSSNVIIGEMSDAANNVV

SEQ ID NO: 97301 - protein, 27 aa, Artificial Sequence
  Cyclic GFR-binding peptide
RPVQMRKIDENEKVVKKATVDAANNVV

SEQ ID NO: 97302 - protein, 27 aa, Artificial Sequence
  Cyclic GFR-binding peptide
SNITMQIMDEYDKVVIGEMSDAANNVV

SEQ ID NO: 97303 - protein, 27 aa, Artificial Sequence
  Cyclic GFR-binding peptide
RPVQIRKIIGKTPKIKKATVDAANNVV

SEQ ID NO: 97304 - protein, 27 aa, Artificial Sequence
  Cyclic GFR-binding peptide
SNITIQIMVGRTPKVIGEMSDAANNVV

SEQ ID NO: 97305 - protein, 29 aa, Artificial Sequence
  Cyclic GFR-binding peptide
EPLPVVYYEIVRKKPIFEQLSNDAANNVV

SEQ ID NO: 97306 - protein, 27 aa, Artificial Sequence
  Cyclic GFR-binding peptide
RSVKIAKVVGRKPKVKEVQVDAANNVV

SEQ ID NO: 97307 - protein, 27 aa, Artificial Sequence
  Cyclic GFR-binding peptide
RSVKMAKVDENEKVVKEVQVDAANNVV

SEQ ID NO: 97308 - protein, 27 aa, Artificial Sequence
  Cyclic GFR-binding peptide
RPVQVRKIDDSSNVIKKATVDAANNVV

SEQ ID NO: 97309 - protein, 27 aa, Artificial Sequence
  Cyclic GFR-binding peptide
RSVKIAKVIGKTPKIKEVQVDAANNVV

SEQ ID NO: 97310 - protein, 29 aa, Artificial Sequence
  Cyclic GFR-binding peptide
EPLTVLYYEIVRKKPIFEQLSNDAANNVV

SEQ ID NO: 97311 - protein, 27 aa, Artificial Sequence
  Cyclic GFR-binding peptide
RSVKVAKVDDSSNVIKEVQVDAANNVV

SEQ ID NO: 97312 - protein, 27 aa, Artificial Sequence
  Cyclic GFR-binding peptide
RPVQIRKIVGRKPKVKKATVDAANNVV

SEQ ID NO: 97313 - protein, 27 aa, Artificial Sequence
  Cyclic GFR-binding peptide
RSVKIAKVVGRTPKVKEVQVDAANNVV

SEQ ID NO: 97314 - protein, 27 aa, Artificial Sequence
  Cyclic GFR-binding peptide
RPVQIRKIVGRTPKVKKATVDAANNVV

SEQ ID NO: 97315 - protein, 29 aa, Artificial Sequence
  Cyclic GFR-binding peptide
EPLTVLYYEYVRKKPKLEQLSNDAANNVV

SEQ ID NO: 97316 - protein, 27 aa, Artificial Sequence
  Cyclic GFR-binding peptide
SNITIQIMVGRKPKVIGEMSDAANNVV

SEQ ID NO: 97317 - protein, 27 aa, Artificial Sequence
  Cyclic GFR-binding peptide
SNITMQIMDENEKVVIGEMSDAANNVV

SEQ ID NO: 97318 - protein, 27 aa, Artificial Sequence
  Cyclic GFR-binding peptide
SNITIQIMIGKTPKIIGEMSDAANNVV

SEQ ID NO: 97319 - protein, 29 aa, Artificial Sequence
  Cyclic GFR-binding peptide
EPLTMLYYRIKPHQGQHEQLSNDAANNVV

SEQ ID NO: 97320 - protein, 27 aa, Artificial Sequence
  Cyclic GFR-binding peptide
RPVQMRKIDEYDKVVKKATVDAANNVV

SEQ ID NO: 97321 - protein, 29 aa, Artificial Sequence
  Cyclic GFR-binding peptide
EPLPMVYYRIKPHQGQHEQLSNDAANNVV

SEQ ID NO: 97322 - protein, 29 aa, Artificial Sequence
  Cyclic GFR-binding peptide
EPLPVVYYEYVRKKPKLEQLSNDAANNVV

SEQ ID NO: 97323 - protein, 27 aa, Artificial Sequence
  Cyclic GFR-binding peptide
RSVKMAKVDEYDKVVKEVQVDAANNVV

SEQ ID NO: 97324 - protein, 27 aa, Artificial Sequence
  Cyclic GFR-binding peptide
DAANNVVRYKKLIIQQKDNFYLMSIAN

SEQ ID NO: 97325 - protein, 27 aa, Artificial Sequence
  Cyclic GFR-binding peptide
DAANNVVRYKKLLLVRGNDFYLMSIAN

SEQ ID NO: 97326 - protein, 27 aa, Artificial Sequence
  Cyclic GFR-binding peptide
NAISMLYFNDKQQIILKKYRDAANNVV

SEQ ID NO: 97327 - protein, 27 aa, Artificial Sequence
  Cyclic GFR-binding peptide
NAISMLYFDNGRVLLLKKYRDAANNVV

SEQ ID NO: 97328 - protein, 27 aa, Artificial Sequence
  Cyclic GFR-binding peptide
DAANNVVEYKFKVVNKNEDLYLISIPE

SEQ ID NO: 97329 - protein, 27 aa, Artificial Sequence
  Cyclic GFR-binding peptide
DAANNVVPIKGYVKPTRGVFYLINIPS

SEQ ID NO: 97330 - protein, 27 aa, Artificial Sequence
  Cyclic GFR-binding peptide
DAANNVVEYKFKLLVRGNDLYLMSIPE

SEQ ID NO: 97331 - protein, 27 aa, Artificial Sequence
  Cyclic GFR-binding peptide
DAANNVVYHYKLVVNKNEDKYLISIPS

SEQ ID NO: 97332 - protein, 27 aa, Artificial Sequence
  Cyclic GFR-binding peptide
DAANNVVRHKRLLLVRGNDYYLMSTAS

SEQ ID NO: 97333 - protein, 27 aa, Artificial Sequence
  Cyclic GFR-binding peptide
DAANNVVYHYKLLLVRGNDKYLMSIPS

SEQ ID NO: 97334 - protein, 27 aa, Artificial Sequence
  Cyclic GFR-binding peptide
DAANNVVRHKRLVVNKNEDYYLISTAS

SEQ ID NO: 97335 - protein, 27 aa, Artificial Sequence
  Cyclic GFR-binding peptide
DAANNVVRYKKLVVNKNEDFYLISIAN

SEQ ID NO: 97336 - protein, 27 aa, Artificial Sequence
  Cyclic GFR-binding peptide
DAANNVVPIKGYVVNKNEDFYLINIPS

SEQ ID NO: 97337 - protein, 27 aa, Artificial Sequence
  Cyclic GFR-binding peptide
DAANNVVPIKGYIKPTKGIFYLINIPS

SEQ ID NO: 97338 - protein, 27 aa, Artificial Sequence
  Cyclic GFR-binding peptide
DAANNVVRHKRLYTVVGKDYYLISTAS

SEQ ID NO: 97339 - protein, 27 aa, Artificial Sequence
  Cyclic GFR-binding peptide
DAANNVVEYKFKVVNNASDLYLISIPE

SEQ ID NO: 97340 - protein, 27 aa, Artificial Sequence
  Cyclic GFR-binding peptide
DAANNVVRHKRLIIQQKDNYYLMSTAS

SEQ ID NO: 97341 - protein, 27 aa, Artificial Sequence
  Cyclic GFR-binding peptide
DAANNVVEYKFKIIQQKDNLYLMSIPE

SEQ ID NO: 97342 - protein, 27 aa, Artificial Sequence
  Cyclic GFR-binding peptide
DAANNVVPIKGYVKPKRGVFYLINIPS

SEQ ID NO: 97343 - protein, 27 aa, Artificial Sequence
  Cyclic GFR-binding peptide
DAANNVVRHKRLVVNNASDYYLISTAS

SEQ ID NO: 97344 - protein, 27 aa, Artificial Sequence
  Cyclic GFR-binding peptide
DAANNVVYHYKLVVNNASDKYLISIPS

SEQ ID NO: 97345 - protein, 27 aa, Artificial Sequence
  Cyclic GFR-binding peptide
DAANNVVYHYKLIIQQKDNKYLMSIPS

SEQ ID NO: 97346 - protein, 27 aa, Artificial Sequence
  Cyclic GFR-binding peptide
DAANNVVRHKRLVVNNAADYYLISTAS

SEQ ID NO: 97347 - protein, 27 aa, Artificial Sequence
  Cyclic GFR-binding peptide
EPISILYLDENKNVVKFKYEDAANNVV

SEQ ID NO: 97348 - protein, 27 aa, Artificial Sequence
  Cyclic GFR-binding peptide
SPINILYFVGRTPKVYGKIPDAANNVV

SEQ ID NO: 97349 - protein, 27 aa, Artificial Sequence
  Cyclic GFR-binding peptide
EPISMLYLDNGRVLLKFKYEDAANNVV

SEQ ID NO: 97350 - protein, 27 aa, Artificial Sequence
  Cyclic GFR-binding peptide
SPISILYKDENKNVVLKYHYDAANNVV

SEQ ID NO: 97351 - protein, 27 aa, Artificial Sequence
  Cyclic GFR-binding peptide
SATSMLYYDNGRVLLLRKHRDAANNVV

SEQ ID NO: 97352 - protein, 27 aa, Artificial Sequence
  Cyclic GFR-binding peptide
SPISMLYKDNGRVLLLKYHYDAANNVV

SEQ ID NO: 97353 - protein, 27 aa, Artificial Sequence
  Cyclic GFR-binding peptide
SATSILYYDENKNVVLRKHRDAANNVV

SEQ ID NO: 97354 - protein, 27 aa, Artificial Sequence
  Cyclic GFR-binding peptide
NAISILYFDENKNVVLKKYRDAANNVV

SEQ ID NO: 97355 - protein, 27 aa, Artificial Sequence
  Cyclic GFR-binding peptide
SPINILYFDENKNVVYGKIPDAANNVV

SEQ ID NO: 97356 - protein, 27 aa, Artificial Sequence
  Cyclic GFR-binding peptide
SPINILYFIGKTPKIYGKIPDAANNVV

SEQ ID NO: 97357 - protein, 27 aa, Artificial Sequence
  Cyclic GFR-binding peptide
SATSILYYDKGVVTYLRKHRDAANNVV

SEQ ID NO: 97358 - protein, 27 aa, Artificial Sequence
  Cyclic GFR-binding peptide
EPISILYLDSANNVVKFKYEDAANNVV

SEQ ID NO: 97359 - protein, 27 aa, Artificial Sequence
  Cyclic GFR-binding peptide
SATSMLYYNDKQQIILRKHRDAANNVV

SEQ ID NO: 97360 - protein, 27 aa, Artificial Sequence
  Cyclic GFR-binding peptide
EPISMLYLNDKQQIIKFKYEDAANNVV

SEQ ID NO: 97361 - protein, 27 aa, Artificial Sequence
  Cyclic GFR-binding peptide
SPINILYFVGRKPKVYGKIPDAANNVV

SEQ ID NO: 97362 - protein, 27 aa, Artificial Sequence
  Cyclic GFR-binding peptide
SATSILYYDSANNVVLRKHRDAANNVV

SEQ ID NO: 97363 - protein, 27 aa, Artificial Sequence
  Cyclic GFR-binding peptide
SPISILYKDSANNVVLKYHYDAANNVV

SEQ ID NO: 97364 - protein, 27 aa, Artificial Sequence
  Cyclic GFR-binding peptide
SPISMLYKNDKQQIILKYHYDAANNVV

SEQ ID NO: 97365 - protein, 27 aa, Artificial Sequence
  Cyclic GFR-binding peptide
SATSILYYDAANNVVLRKHRDAANNVV

SEQ ID NO: 97366 - protein, 27 aa, Artificial Sequence
  Cyclic GFR-binding peptide
DAANNVVSMEGIIIQQKDNMIQMTINS

SEQ ID NO: 97367 - protein, 27 aa, Artificial Sequence
  Cyclic GFR-binding peptide
DAANNVVSMEGLVKPKRGVMIQITINS

SEQ ID NO: 97368 - protein, 27 aa, Artificial Sequence
  Cyclic GFR-binding peptide
DAANNVVSMEGLVVNNASDMIQITINS

SEQ ID NO: 97369 - protein, 27 aa, Artificial Sequence
  Cyclic GFR-binding peptide
DAANNVVSMEGILLVRGNDMIQMTINS

SEQ ID NO: 97370 - protein, 27 aa, Artificial Sequence
  Cyclic GFR-binding peptide
DAANNVVSMEGLIKPTKGIMIQITINS

SEQ ID NO: 97371 - protein, 27 aa, Artificial Sequence
  Cyclic GFR-binding peptide
DAANNVVSMEGLIVNSSDDMIQVTINS

SEQ ID NO: 97372 - protein, 27 aa, Artificial Sequence
  Cyclic GFR-binding peptide
DAANNVVSMEGIVVNNASDMIQITINS

SEQ ID NO: 97373 - protein, 27 aa, Artificial Sequence
  Cyclic GFR-binding peptide
DAANNVVSMEGLVVNNAADMIQITINS

SEQ ID NO: 97374 - protein, 27 aa, Artificial Sequence
  Cyclic GFR-binding peptide
DAANNVVSMEGLLLVRGNDMIQMTINS

SEQ ID NO: 97375 - protein, 27 aa, Artificial Sequence
  Cyclic GFR-binding peptide
DAANNVVSMEGLIIQQKDNMIQMTINS

SEQ ID NO: 97376 - protein, 27 aa, Artificial Sequence
  Cyclic GFR-binding peptide
DAANNVVSMEGIVVNNAADMIQITINS

SEQ ID NO: 97377 - protein, 27 aa, Artificial Sequence
  Cyclic GFR-binding peptide
DAANNVVSMEGLVKPTRGVMIQITINS

SEQ ID NO: 97378 - protein, 27 aa, Artificial Sequence
  Cyclic GFR-binding peptide
SNITMQIMNDKQQIIIGEMSDAANNVV

SEQ ID NO: 97379 - protein, 27 aa, Artificial Sequence
  Cyclic GFR-binding peptide
SNITIQIMVGRKPKVLGEMSDAANNVV

SEQ ID NO: 97380 - protein, 27 aa, Artificial Sequence
  Cyclic GFR-binding peptide
SNITIQIMDSANNVVLGEMSDAANNVV

SEQ ID NO: 97381 - protein, 27 aa, Artificial Sequence
  Cyclic GFR-binding peptide
SNITMQIMDNGRVLLIGEMSDAANNVV

SEQ ID NO: 97382 - protein, 27 aa, Artificial Sequence
  Cyclic GFR-binding peptide
SNITIQIMIGKTPKILGEMSDAANNVV

SEQ ID NO: 97383 - protein, 27 aa, Artificial Sequence
  Cyclic GFR-binding peptide
SNITVQIMDDSSNVILGEMSDAANNVV

SEQ ID NO: 97384 - protein, 27 aa, Artificial Sequence
  Cyclic GFR-binding peptide
SNITIQIMDSANNVVIGEMSDAANNVV

SEQ ID NO: 97385 - protein, 27 aa, Artificial Sequence
  Cyclic GFR-binding peptide
SNITIQIMDAANNVVLGEMSDAANNVV

SEQ ID NO: 97386 - protein, 27 aa, Artificial Sequence
  Cyclic GFR-binding peptide
SNITMQIMDNGRVLLLGEMSDAANNVV

SEQ ID NO: 97387 - protein, 27 aa, Artificial Sequence
  Cyclic GFR-binding peptide
SNITMQIMNDKQQIILGEMSDAANNVV

SEQ ID NO: 97388 - protein, 27 aa, Artificial Sequence
  Cyclic GFR-binding peptide
SNITIQIMDAANNVVIGEMSDAANNVV

SEQ ID NO: 97389 - protein, 27 aa, Artificial Sequence
  Cyclic GFR-binding peptide
SNITIQIMVGRTPKVLGEMSDAANNVV

SEQ ID NO: 97390 - protein, 27 aa, Artificial Sequence
  Cyclic GFR-binding peptide
DAANNVVQYNKLVVNKNEDLYLISIAS

SEQ ID NO: 97391 - protein, 27 aa, Artificial Sequence
  Cyclic GFR-binding peptide
DAANNVVQYNKLVVNNAADLYLISIAS

SEQ ID NO: 97392 - protein, 27 aa, Artificial Sequence
  Cyclic GFR-binding peptide
DAANNVVQYNKLIIQQKDNLYLMSIAS

SEQ ID NO: 97393 - protein, 27 aa, Artificial Sequence
  Cyclic GFR-binding peptide
DAANNVVQYNKLLLVRGNDLYLMSIAS

SEQ ID NO: 97394 - protein, 27 aa, Artificial Sequence
  Cyclic GFR-binding peptide
DAANNVVQYNKLYTVVGKDLYLISIAS

SEQ ID NO: 97395 - protein, 27 aa, Artificial Sequence
  Cyclic GFR-binding peptide
SAISILYLDENKNVVLKNYQDAANNVV

SEQ ID NO: 97396 - protein, 27 aa, Artificial Sequence
  Cyclic GFR-binding peptide
SAISILYLDAANNVVLKNYQDAANNVV

SEQ ID NO: 97397 - protein, 27 aa, Artificial Sequence
  Cyclic GFR-binding peptide
SAISMLYLNDKQQIILKNYQDAANNVV

SEQ ID NO: 97398 - protein, 27 aa, Artificial Sequence
  Cyclic GFR-binding peptide
SAISMLYLDNGRVLLLKNYQDAANNVV

SEQ ID NO: 97399 - protein, 27 aa, Artificial Sequence
  Cyclic GFR-binding peptide
SAISILYLDKGVVTYLKNYQDAANNVV

SEQ ID NO: 97400 - protein, 27 aa, Artificial Sequence
  Cyclic GFR-binding peptide
DSANNVVRYKKLIKPTKGIFYLISIAN

SEQ ID NO: 97401 - protein, 29 aa, Artificial Sequence
  Cyclic GFR-binding peptide
DSANNVVRHKRLFIPKKRVIEYYLVSTAS

SEQ ID NO: 97402 - protein, 27 aa, Artificial Sequence
  Cyclic GFR-binding peptide
DSANNVVYHYKLVVKDYEDKYLMSIPS

SEQ ID NO: 97403 - protein, 27 aa, Artificial Sequence
  Cyclic GFR-binding peptide
DSANNVVQYNKLIVNNSSDLYLVSIAS

SEQ ID NO: 97404 - protein, 27 aa, Artificial Sequence
  Cyclic GFR-binding peptide
DSANNVVRYKKLVVKDYEDFYLMSIAN

SEQ ID NO: 97405 - protein, 27 aa, Artificial Sequence
  Cyclic GFR-binding peptide
DSANNVVRYKKLVKPTRGVFYLISIAN

SEQ ID NO: 97406 - protein, 27 aa, Artificial Sequence
  Cyclic GFR-binding peptide
DSANNVVRHKRLVVKENEDYYLMSTAS

SEQ ID NO: 97407 - protein, 27 aa, Artificial Sequence
  Cyclic GFR-binding peptide
DSANNVVYHYKLIKPTKGIKYLISIPS

SEQ ID NO: 97408 - protein, 29 aa, Artificial Sequence
  Cyclic GFR-binding peptide
DSANNVVRYKKLFIPKKRVIEFYLVSIAN

SEQ ID NO: 97409 - protein, 27 aa, Artificial Sequence
  Cyclic GFR-binding peptide
DSANNVVYHYKLVVKENEDKYLMSIPS

SEQ ID NO: 97410 - protein, 27 aa, Artificial Sequence
  Cyclic GFR-binding peptide
DSANNVVRHKRLVKPKRGVYYLISTAS

SEQ ID NO: 97411 - protein, 27 aa, Artificial Sequence
  Cyclic GFR-binding peptide
DSANNVVYHYKLVKPKRGVKYLISIPS

SEQ ID NO: 97412 - protein, 29 aa, Artificial Sequence
  Cyclic GFR-binding peptide
DSANNVVQYNKLFIPKKRVIELYLVSIAS

SEQ ID NO: 97413 - protein, 27 aa, Artificial Sequence
  Cyclic GFR-binding peptide
DSANNVVQYNKLVKPTRGVLYLISIAS

SEQ ID NO: 97414 - protein, 27 aa, Artificial Sequence
  Cyclic GFR-binding peptide
DSANNVVRYKKLVVKENEDFYLMSIAN

SEQ ID NO: 97415 - protein, 27 aa, Artificial Sequence
  Cyclic GFR-binding peptide
DSANNVVQYNKLTPVGMDDLYLVSIAS

SEQ ID NO: 97416 - protein, 27 aa, Artificial Sequence
  Cyclic GFR-binding peptide
DSANNVVRYKKLTPVGMDDFYLVSIAN

SEQ ID NO: 97417 - protein, 27 aa, Artificial Sequence
  Cyclic GFR-binding peptide
DSANNVVRYKKLVKPKRGVFYLISIAN

SEQ ID NO: 97418 - protein, 27 aa, Artificial Sequence
  Cyclic GFR-binding peptide
DSANNVVQYNKLVVKENEDLYLMSIAS

SEQ ID NO: 97419 - protein, 27 aa, Artificial Sequence
  Cyclic GFR-binding peptide
DSANNVVYHYKLIVNSSDDKYLVSIPS

SEQ ID NO: 97420 - protein, 27 aa, Artificial Sequence
  Cyclic GFR-binding peptide
DSANNVVQYNKLVKPKRGVLYLISIAS

SEQ ID NO: 97421 - protein, 27 aa, Artificial Sequence
  Cyclic GFR-binding peptide
DSANNVVRYKKLIVNNSSDFYLVSIAN

SEQ ID NO: 97422 - protein, 27 aa, Artificial Sequence
  Cyclic GFR-binding peptide
DSANNVVRYKKLIVNSSDDFYLVSIAN

SEQ ID NO: 97423 - protein, 27 aa, Artificial Sequence
  Cyclic GFR-binding peptide
DSANNVVRHKRLVKPTRGVYYLISTAS

SEQ ID NO: 97424 - protein, 29 aa, Artificial Sequence
  Cyclic GFR-binding peptide
DSANNVVYHYKLFIPKKRVIEKYLVSIPS

SEQ ID NO: 97425 - protein, 27 aa, Artificial Sequence
  Cyclic GFR-binding peptide
DSANNVVRHKRLIKPTKGIYYLISTAS

SEQ ID NO: 97426 - protein, 27 aa, Artificial Sequence
  Cyclic GFR-binding peptide
DSANNVVRHKRLTPVGMDDYYLVSTAS

SEQ ID NO: 97427 - protein, 27 aa, Artificial Sequence
  Cyclic GFR-binding peptide
DSANNVVYHYKLTPVGMDDKYLVSIPS

SEQ ID NO: 97428 - protein, 27 aa, Artificial Sequence
  Cyclic GFR-binding peptide
DSANNVVYHYKLIVNNSSDKYLVSIPS

SEQ ID NO: 97429 - protein, 27 aa, Artificial Sequence
  Cyclic GFR-binding peptide
DSANNVVRHKRLIVNNSSDYYLVSTAS

SEQ ID NO: 97430 - protein, 27 aa, Artificial Sequence
  Cyclic GFR-binding peptide
DSANNVVYHYKLVKPTRGVKYLISIPS

SEQ ID NO: 97431 - protein, 27 aa, Artificial Sequence
  Cyclic GFR-binding peptide
DSANNVVRHKRLIVNSSDDYYLVSTAS

SEQ ID NO: 97432 - protein, 27 aa, Artificial Sequence
  Cyclic GFR-binding peptide
DSANNVVRHKRLVVKDYEDYYLMSTAS

SEQ ID NO: 97433 - protein, 27 aa, Artificial Sequence
  Cyclic GFR-binding peptide
DSANNVVQYNKLIKPTKGILYLISIAS

SEQ ID NO: 97434 - protein, 27 aa, Artificial Sequence
  Cyclic GFR-binding peptide
DSANNVVQYNKLVVKDYEDLYLMSIAS

SEQ ID NO: 97435 - protein, 27 aa, Artificial Sequence
  Cyclic GFR-binding peptide
DSANNVVQYNKLIVNSSDDLYLVSIAS

SEQ ID NO: 97436 - protein, 27 aa, Artificial Sequence
  Cyclic GFR-binding peptide
NAISILYFIGKTPKILKKYRDSANNVV

SEQ ID NO: 97437 - protein, 29 aa, Artificial Sequence
  Cyclic GFR-binding peptide
SATSVLYYEIVRKKPIFLRKHRDSANNVV

SEQ ID NO: 97438 - protein, 27 aa, Artificial Sequence
  Cyclic GFR-binding peptide
SPISMLYKDEYDKVVLKYHYDSANNVV

SEQ ID NO: 97439 - protein, 27 aa, Artificial Sequence
  Cyclic GFR-binding peptide
SAISVLYLDSSNNVILKNYQDSANNVV

SEQ ID NO: 97440 - protein, 27 aa, Artificial Sequence
  Cyclic GFR-binding peptide
NAISMLYFDEYDKVVLKKYRDSANNVV

SEQ ID NO: 97441 - protein, 27 aa, Artificial Sequence
  Cyclic GFR-binding peptide
NAISILYFVGRTPKVLKKYRDSANNVV

SEQ ID NO: 97442 - protein, 27 aa, Artificial Sequence
  Cyclic GFR-binding peptide
SATSMLYYDENEKVVLRKHRDSANNVV

SEQ ID NO: 97443 - protein, 27 aa, Artificial Sequence
  Cyclic GFR-binding peptide
SPISILYKIGKTPKILKYHYDSANNVV

SEQ ID NO: 97444 - protein, 29 aa, Artificial Sequence
  Cyclic GFR-binding peptide
NAISVLYFEIVRKKPIFLKKYRDSANNVV

SEQ ID NO: 97445 - protein, 27 aa, Artificial Sequence
  Cyclic GFR-binding peptide
SPISMLYKDENEKVVLKYHYDSANNVV

SEQ ID NO: 97446 - protein, 27 aa, Artificial Sequence
  Cyclic GFR-binding peptide
SATSILYYVGRKPKVLRKHRDSANNVV

SEQ ID NO: 97447 - protein, 27 aa, Artificial Sequence
  Cyclic GFR-binding peptide
SPISILYKVGRKPKVLKYHYDSANNVV

SEQ ID NO: 97448 - protein, 29 aa, Artificial Sequence
  Cyclic GFR-binding peptide
SAISVLYLEIVRKKPIFLKNYQDSANNVV

SEQ ID NO: 97449 - protein, 27 aa, Artificial Sequence
  Cyclic GFR-binding peptide
SAISILYLVGRTPKVLKNYQDSANNVV

SEQ ID NO: 97450 - protein, 27 aa, Artificial Sequence
  Cyclic GFR-binding peptide
NAISMLYFDENEKVVLKKYRDSANNVV

SEQ ID NO: 97451 - protein, 27 aa, Artificial Sequence
  Cyclic GFR-binding peptide
SAISVLYLDDMGVPTLKNYQDSANNVV

SEQ ID NO: 97452 - protein, 27 aa, Artificial Sequence
  Cyclic GFR-binding peptide
NAISVLYFDDMGVPTLKKYRDSANNVV

SEQ ID NO: 97453 - protein, 27 aa, Artificial Sequence
  Cyclic GFR-binding peptide
NAISILYFVGRKPKVLKKYRDSANNVV

SEQ ID NO: 97454 - protein, 27 aa, Artificial Sequence
  Cyclic GFR-binding peptide
SAISMLYLDENEKVVLKNYQDSANNVV

SEQ ID NO: 97455 - protein, 27 aa, Artificial Sequence
  Cyclic GFR-binding peptide
SPISVLYKDDSSNVILKYHYDSANNVV

SEQ ID NO: 97456 - protein, 27 aa, Artificial Sequence
  Cyclic GFR-binding peptide
SAISILYLVGRKPKVLKNYQDSANNVV

SEQ ID NO: 97457 - protein, 27 aa, Artificial Sequence
  Cyclic GFR-binding peptide
NAISVLYFDSSNNVILKKYRDSANNVV

SEQ ID NO: 97458 - protein, 27 aa, Artificial Sequence
  Cyclic GFR-binding peptide
NAISVLYFDDSSNVILKKYRDSANNVV

SEQ ID NO: 97459 - protein, 27 aa, Artificial Sequence
  Cyclic GFR-binding peptide
SATSILYYVGRTPKVLRKHRDSANNVV

SEQ ID NO: 97460 - protein, 29 aa, Artificial Sequence
  Cyclic GFR-binding peptide
SPISVLYKEIVRKKPIFLKYHYDSANNVV

SEQ ID NO: 97461 - protein, 27 aa, Artificial Sequence
  Cyclic GFR-binding peptide
SATSILYYIGKTPKILRKHRDSANNVV

SEQ ID NO: 97462 - protein, 27 aa, Artificial Sequence
  Cyclic GFR-binding peptide
SATSVLYYDDMGVPTLRKHRDSANNVV

SEQ ID NO: 97463 - protein, 27 aa, Artificial Sequence
  Cyclic GFR-binding peptide
SPISVLYKDDMGVPTLKYHYDSANNVV

SEQ ID NO: 97464 - protein, 27 aa, Artificial Sequence
  Cyclic GFR-binding peptide
SPISVLYKDSSNNVILKYHYDSANNVV

SEQ ID NO: 97465 - protein, 27 aa, Artificial Sequence
  Cyclic GFR-binding peptide
SATSVLYYDSSNNVILRKHRDSANNVV

SEQ ID NO: 97466 - protein, 27 aa, Artificial Sequence
  Cyclic GFR-binding peptide
SPISILYKVGRTPKVLKYHYDSANNVV

SEQ ID NO: 97467 - protein, 27 aa, Artificial Sequence
  Cyclic GFR-binding peptide
SATSVLYYDDSSNVILRKHRDSANNVV

SEQ ID NO: 97468 - protein, 27 aa, Artificial Sequence
  Cyclic GFR-binding peptide
SATSMLYYDEYDKVVLRKHRDSANNVV

SEQ ID NO: 97469 - protein, 27 aa, Artificial Sequence
  Cyclic GFR-binding peptide
SAISILYLIGKTPKILKNYQDSANNVV

SEQ ID NO: 97470 - protein, 27 aa, Artificial Sequence
  Cyclic GFR-binding peptide
SAISMLYLDEYDKVVLKNYQDSANNVV

SEQ ID NO: 97471 - protein, 27 aa, Artificial Sequence
  Cyclic GFR-binding peptide
SAISVLYLDDSSNVILKNYQDSANNVV

SEQ ID NO: 97472 - protein, 27 aa, Artificial Sequence
  Cyclic GFR-binding peptide
DSANNVVNSLQEVVKDYEDYYLMTLPE

SEQ ID NO: 97473 - protein, 27 aa, Artificial Sequence
  Cyclic GFR-binding peptide
DSANNVVNSLQEIKPTKGIYYVIPLPE

SEQ ID NO: 97474 - protein, 27 aa, Artificial Sequence
  Cyclic GFR-binding peptide
DSANNVVNSLQEVKPKRGVYYLITLPE

SEQ ID NO: 97475 - protein, 27 aa, Artificial Sequence
  Cyclic GFR-binding peptide
DSANNVVNSLQEVKPTRGVYYVIPLPE

SEQ ID NO: 97476 - protein, 27 aa, Artificial Sequence
  Cyclic GFR-binding peptide
DSANNVVEYQKYIVNSSDDIFLVSIPS

SEQ ID NO: 97477 - protein, 27 aa, Artificial Sequence
  Cyclic GFR-binding peptide
DSANNVVEYQKYVKPTRGVIFLISIPS

SEQ ID NO: 97478 - protein, 27 aa, Artificial Sequence
  Cyclic GFR-binding peptide
DSANNVVNSLQEVVKENEDYYLMTLPE

SEQ ID NO: 97479 - protein, 27 aa, Artificial Sequence
  Cyclic GFR-binding peptide
DSANNVVNSLQEVVNNASDYYLITLPE

SEQ ID NO: 97480 - protein, 27 aa, Artificial Sequence
  Cyclic GFR-binding peptide
DSANNVVNSLQEVKPKRGVYYVIPLPE

SEQ ID NO: 97481 - protein, 27 aa, Artificial Sequence
  Cyclic GFR-binding peptide
DSANNVVNSLQEVVNNASDYYVIPLPE

SEQ ID NO: 97482 - protein, 27 aa, Artificial Sequence
  Cyclic GFR-binding peptide
DSANNVVNSLQEVKPTRGVYYLITLPE

SEQ ID NO: 97483 - protein, 27 aa, Artificial Sequence
  Cyclic GFR-binding peptide
DSANNVVEYQKYIKPTKGIIFLISIPS

SEQ ID NO: 97484 - protein, 27 aa, Artificial Sequence
  Cyclic GFR-binding peptide
DSANNVVEYQKYVVNNASDIFLISIPS

SEQ ID NO: 97485 - protein, 27 aa, Artificial Sequence
  Cyclic GFR-binding peptide
DSANNVVNSLQEIVNSSDDYYVVPLPE

SEQ ID NO: 97486 - protein, 27 aa, Artificial Sequence
  Cyclic GFR-binding peptide
DSANNVVNSLQEVVKDYEDYYVMPLPE

SEQ ID NO: 97487 - protein, 27 aa, Artificial Sequence
  Cyclic GFR-binding peptide
DSANNVVEYQKYVVKENEDIFLMSIPS

SEQ ID NO: 97488 - protein, 27 aa, Artificial Sequence
  Cyclic GFR-binding peptide
DSANNVVNSLQEVVKENEDYYVMPLPE

SEQ ID NO: 97489 - protein, 27 aa, Artificial Sequence
  Cyclic GFR-binding peptide
DSANNVVEYQKYVVKDYEDIFLMSIPS

SEQ ID NO: 97490 - protein, 27 aa, Artificial Sequence
  Cyclic GFR-binding peptide
DSANNVVQYNKLVVNNASDLYLISIAS

SEQ ID NO: 97491 - protein, 27 aa, Artificial Sequence
  Cyclic GFR-binding peptide
DSANNVVNSLQEIKPTKGIYYLITLPE

SEQ ID NO: 97492 - protein, 27 aa, Artificial Sequence
  Cyclic GFR-binding peptide
DSANNVVEYQKYVKPKRGVIFLISIPS

SEQ ID NO: 97493 - protein, 27 aa, Artificial Sequence
  Cyclic GFR-binding peptide
DSANNVVRYKKLVVNNASDFYLISIAN

SEQ ID NO: 97494 - protein, 27 aa, Artificial Sequence
  Cyclic GFR-binding peptide
DSANNVVNSLQEIVNSSDDYYLVTLPE

SEQ ID NO: 97495 - protein, 27 aa, Artificial Sequence
  Cyclic GFR-binding peptide
EPLTMLYYDEYDKVVEQLSNDSANNVV

SEQ ID NO: 97496 - protein, 27 aa, Artificial Sequence
  Cyclic GFR-binding peptide
EPLPIVYYIGKTPKIEQLSNDSANNVV

SEQ ID NO: 97497 - protein, 27 aa, Artificial Sequence
  Cyclic GFR-binding peptide
EPLTILYYVGRKPKVEQLSNDSANNVV

SEQ ID NO: 97498 - protein, 27 aa, Artificial Sequence
  Cyclic GFR-binding peptide
EPLPIVYYVGRTPKVEQLSNDSANNVV

SEQ ID NO: 97499 - protein, 27 aa, Artificial Sequence
  Cyclic GFR-binding peptide
SPISVLFIDDSSNVIYKQYEDSANNVV

SEQ ID NO: 97500 - protein, 27 aa, Artificial Sequence
  Cyclic GFR-binding peptide
SPISILFIVGRTPKVYKQYEDSANNVV

SEQ ID NO: 97501 - protein, 27 aa, Artificial Sequence
  Cyclic GFR-binding peptide
EPLTMLYYDENEKVVEQLSNDSANNVV

SEQ ID NO: 97502 - protein, 27 aa, Artificial Sequence
  Cyclic GFR-binding peptide
EPLTILYYDSANNVVEQLSNDSANNVV

SEQ ID NO: 97503 - protein, 27 aa, Artificial Sequence
  Cyclic GFR-binding peptide
EPLPIVYYVGRKPKVEQLSNDSANNVV

SEQ ID NO: 97504 - protein, 27 aa, Artificial Sequence
  Cyclic GFR-binding peptide
EPLPIVYYDSANNVVEQLSNDSANNVV

SEQ ID NO: 97505 - protein, 27 aa, Artificial Sequence
  Cyclic GFR-binding peptide
EPLTILYYVGRTPKVEQLSNDSANNVV

SEQ ID NO: 97506 - protein, 27 aa, Artificial Sequence
  Cyclic GFR-binding peptide
SPISILFIIGKTPKIYKQYEDSANNVV

SEQ ID NO: 97507 - protein, 27 aa, Artificial Sequence
  Cyclic GFR-binding peptide
SPISILFIDSANNVVYKQYEDSANNVV

SEQ ID NO: 97508 - protein, 27 aa, Artificial Sequence
  Cyclic GFR-binding peptide
EPLPVVYYDDSSNVIEQLSNDSANNVV

SEQ ID NO: 97509 - protein, 27 aa, Artificial Sequence
  Cyclic GFR-binding peptide
EPLPMVYYDEYDKVVEQLSNDSANNVV

SEQ ID NO: 97510 - protein, 27 aa, Artificial Sequence
  Cyclic GFR-binding peptide
SPISMLFIDENEKVVYKQYEDSANNVV

SEQ ID NO: 97511 - protein, 27 aa, Artificial Sequence
  Cyclic GFR-binding peptide
EPLPMVYYDENEKVVEQLSNDSANNVV

SEQ ID NO: 97512 - protein, 27 aa, Artificial Sequence
  Cyclic GFR-binding peptide
SPISMLFIDEYDKVVYKQYEDSANNVV

SEQ ID NO: 97513 - protein, 27 aa, Artificial Sequence
  Cyclic GFR-binding peptide
SAISILYLDSANNVVLKNYQDSANNVV

SEQ ID NO: 97514 - protein, 27 aa, Artificial Sequence
  Cyclic GFR-binding peptide
EPLTILYYIGKTPKIEQLSNDSANNVV

SEQ ID NO: 97515 - protein, 27 aa, Artificial Sequence
  Cyclic GFR-binding peptide
SPISILFIVGRKPKVYKQYEDSANNVV

SEQ ID NO: 97516 - protein, 27 aa, Artificial Sequence
  Cyclic GFR-binding peptide
NAISILYFDSANNVVLKKYRDSANNVV

SEQ ID NO: 97517 - protein, 27 aa, Artificial Sequence
  Cyclic GFR-binding peptide
EPLTVLYYDDSSNVIEQLSNDSANNVV

SEQ ID NO: 97518 - protein, 29 aa, Artificial Sequence
  Cyclic GFR-binding peptide
DSANNVVVTAKKLKPKKRVYEIKRVQVPR

SEQ ID NO: 97519 - protein, 29 aa, Artificial Sequence
  Cyclic GFR-binding peptide
DSANNVVVQVEKLKPKKRVYEVKAVKVSR

SEQ ID NO: 97520 - protein, 29 aa, Artificial Sequence
  Cyclic GFR-binding peptide
DSANNVVVQVEKFIPKKRVIEVKAVKVSR

SEQ ID NO: 97521 - protein, 29 aa, Artificial Sequence
  Cyclic GFR-binding peptide
DSANNVVVQVEKHQGQHPKIRVKAMKVSR

SEQ ID NO: 97522 - protein, 29 aa, Artificial Sequence
  Cyclic GFR-binding peptide
DSANNVVVTAKKHQGQHPKIRIKRMQVPR

SEQ ID NO: 97523 - protein, 29 aa, Artificial Sequence
  Cyclic GFR-binding peptide
DSANNVVSMEGLLKPKKRVYEMIQVTINS

SEQ ID NO: 97524 - protein, 29 aa, Artificial Sequence
  Cyclic GFR-binding peptide
DSANNVVSMEGIFIPKKRVIEMIQVTINS

SEQ ID NO: 97525 - protein, 29 aa, Artificial Sequence
  Cyclic GFR-binding peptide
DSANNVVSMEGLHQGQHPKIRMIQMTINS

SEQ ID NO: 97526 - protein, 29 aa, Artificial Sequence
  Cyclic GFR-binding peptide
DSANNVVSMEGILKPKKRVYEMIQVTINS

SEQ ID NO: 97527 - protein, 29 aa, Artificial Sequence
  Cyclic GFR-binding peptide
DSANNVVSMEGLFIPKKRVIEMIQVTINS

SEQ ID NO: 97528 - protein, 29 aa, Artificial Sequence
  Cyclic GFR-binding peptide
DSANNVVVTAKKFIPKKRVIEIKRVQVPR

SEQ ID NO: 97529 - protein, 29 aa, Artificial Sequence
  Cyclic GFR-binding peptide
DSANNVVSMEGIHQGQHPKIRMIQMTINS

SEQ ID NO: 97530 - protein, 29 aa, Artificial Sequence
  Cyclic GFR-binding peptide
RPVQVRKIEYVRKKPKLKKATVDSANNVV

SEQ ID NO: 97531 - protein, 29 aa, Artificial Sequence
  Cyclic GFR-binding peptide
RSVKVAKVEYVRKKPKLKEVQVDSANNVV

SEQ ID NO: 97532 - protein, 29 aa, Artificial Sequence
  Cyclic GFR-binding peptide
RSVKVAKVEIVRKKPIFKEVQVDSANNVV

SEQ ID NO: 97533 - protein, 29 aa, Artificial Sequence
  Cyclic GFR-binding peptide
RSVKMAKVRIKPHQGQHKEVQVDSANNVV

SEQ ID NO: 97534 - protein, 29 aa, Artificial Sequence
  Cyclic GFR-binding peptide
RPVQMRKIRIKPHQGQHKKATVDSANNVV

SEQ ID NO: 97535 - protein, 29 aa, Artificial Sequence
  Cyclic GFR-binding peptide
SNITVQIMEYVRKKPKLLGEMSDSANNVV

SEQ ID NO: 97536 - protein, 29 aa, Artificial Sequence
  Cyclic GFR-binding peptide
SNITVQIMEIVRKKPIFIGEMSDSANNVV

SEQ ID NO: 97537 - protein, 29 aa, Artificial Sequence
  Cyclic GFR-binding peptide
SNITMQIMRIKPHQGQHLGEMSDSANNVV

SEQ ID NO: 97538 - protein, 29 aa, Artificial Sequence
  Cyclic GFR-binding peptide
SNITVQIMEYVRKKPKLIGEMSDSANNVV

SEQ ID NO: 97539 - protein, 29 aa, Artificial Sequence
  Cyclic GFR-binding peptide
SNITVQIMEIVRKKPIFLGEMSDSANNVV

SEQ ID NO: 97540 - protein, 29 aa, Artificial Sequence
  Cyclic GFR-binding peptide
RPVQVRKIEIVRKKPIFKKATVDSANNVV

SEQ ID NO: 97541 - protein, 29 aa, Artificial Sequence
  Cyclic GFR-binding peptide
SNITMQIMRIKPHQGQHIGEMSDSANNVV

SEQ ID NO: 97542 - protein, 27 aa, Artificial Sequence
  Cyclic GFR-binding peptide
DSANNVVEYKFKVKPTRGVLYLISIPE

SEQ ID NO: 97543 - protein, 27 aa, Artificial Sequence
  Cyclic GFR-binding peptide
DSANNVVEYKFKTPVGMDDLYLVSIPE

SEQ ID NO: 97544 - protein, 27 aa, Artificial Sequence
  Cyclic GFR-binding peptide
DSANNVVEYQKYVKPKRGVIYLISIPS

SEQ ID NO: 97545 - protein, 27 aa, Artificial Sequence
  Cyclic GFR-binding peptide
DSANNVVEYQKYVVKDYEDIYLMSIPS

SEQ ID NO: 97546 - protein, 27 aa, Artificial Sequence
  Cyclic GFR-binding peptide
DSANNVVEYKFKIKPTKGILYLISIPE

SEQ ID NO: 97547 - protein, 27 aa, Artificial Sequence
  Cyclic GFR-binding peptide
DSANNVVYHYKLYTVVGKDKYLISIPS

SEQ ID NO: 97548 - protein, 27 aa, Artificial Sequence
  Cyclic GFR-binding peptide
DSANNVVRYKKLYTVVGKDFYLISIAN

SEQ ID NO: 97549 - protein, 27 aa, Artificial Sequence
  Cyclic GFR-binding peptide
DSANNVVEYQKYVVNNAADIYLISIPS

SEQ ID NO: 97550 - protein, 27 aa, Artificial Sequence
  Cyclic GFR-binding peptide
DSANNVVEYQKYVKPTRGVIYLISIPS

SEQ ID NO: 97551 - protein, 27 aa, Artificial Sequence
  Cyclic GFR-binding peptide
DSANNVVEYQKYTPVGMDDIYLVSIPS

SEQ ID NO: 97552 - protein, 27 aa, Artificial Sequence
  Cyclic GFR-binding peptide
DSANNVVEYKFKVVKDYEDLYLMSIPE

SEQ ID NO: 97553 - protein, 27 aa, Artificial Sequence
  Cyclic GFR-binding peptide
DSANNVVEYKFKVVNNAADLYLISIPE

SEQ ID NO: 97554 - protein, 27 aa, Artificial Sequence
  Cyclic GFR-binding peptide
DSANNVVEYQKYVVKENEDIYLMSIPS

SEQ ID NO: 97555 - protein, 27 aa, Artificial Sequence
  Cyclic GFR-binding peptide
DSANNVVEYQKYIKPTKGIIYLISIPS

SEQ ID NO: 97556 - protein, 27 aa, Artificial Sequence
  Cyclic GFR-binding peptide
DSANNVVRYKKLVVNNAADFYLISIAN

SEQ ID NO: 97557 - protein, 27 aa, Artificial Sequence
  Cyclic GFR-binding peptide
DSANNVVYHYKLVVNNAADKYLISIPS

SEQ ID NO: 97558 - protein, 27 aa, Artificial Sequence
  Cyclic GFR-binding peptide
DSANNVVEYKFKIVNNSSDLYLVSIPE

SEQ ID NO: 97559 - protein, 27 aa, Artificial Sequence
  Cyclic GFR-binding peptide
DSANNVVEYQKYIVNSSDDIYLVSIPS

SEQ ID NO: 97560 - protein, 27 aa, Artificial Sequence
  Cyclic GFR-binding peptide
DSANNVVEYKFKIVNSSDDLYLVSIPE

SEQ ID NO: 97561 - protein, 27 aa, Artificial Sequence
  Cyclic GFR-binding peptide
DSANNVVEYKFKVKPKRGVLYLISIPE

SEQ ID NO: 97562 - protein, 27 aa, Artificial Sequence
  Cyclic GFR-binding peptide
DSANNVVEYQKYYTVVGKDIYLISIPS

SEQ ID NO: 97563 - protein, 27 aa, Artificial Sequence
  Cyclic GFR-binding peptide
DSANNVVEYKFKVVKENEDLYLMSIPE

SEQ ID NO: 97564 - protein, 27 aa, Artificial Sequence
  Cyclic GFR-binding peptide
DSANNVVEYQKYIVNNSSDIYLVSIPS

SEQ ID NO: 97565 - protein, 27 aa, Artificial Sequence
  Cyclic GFR-binding peptide
DSANNVVEYKFKYTVVGKDLYLISIPE

SEQ ID NO: 97566 - protein, 27 aa, Artificial Sequence
  Cyclic GFR-binding peptide
EPISILYLVGRTPKVKFKYEDSANNVV

SEQ ID NO: 97567 - protein, 27 aa, Artificial Sequence
  Cyclic GFR-binding peptide
EPISVLYLDDMGVPTKFKYEDSANNVV

SEQ ID NO: 97568 - protein, 27 aa, Artificial Sequence
  Cyclic GFR-binding peptide
SPISILYIVGRKPKVYKQYEDSANNVV

SEQ ID NO: 97569 - protein, 27 aa, Artificial Sequence
  Cyclic GFR-binding peptide
SPISMLYIDEYDKVVYKQYEDSANNVV

SEQ ID NO: 97570 - protein, 27 aa, Artificial Sequence
  Cyclic GFR-binding peptide
EPISILYLIGKTPKIKFKYEDSANNVV

SEQ ID NO: 97571 - protein, 27 aa, Artificial Sequence
  Cyclic GFR-binding peptide
SPISILYKDKGVVTYLKYHYDSANNVV

SEQ ID NO: 97572 - protein, 27 aa, Artificial Sequence
  Cyclic GFR-binding peptide
NAISILYFDKGVVTYLKKYRDSANNVV

SEQ ID NO: 97573 - protein, 27 aa, Artificial Sequence
  Cyclic GFR-binding peptide
SPISILYIDAANNVVYKQYEDSANNVV

SEQ ID NO: 97574 - protein, 27 aa, Artificial Sequence
  Cyclic GFR-binding peptide
SPISILYIVGRTPKVYKQYEDSANNVV

SEQ ID NO: 97575 - protein, 27 aa, Artificial Sequence
  Cyclic GFR-binding peptide
SPISVLYIDDMGVPTYKQYEDSANNVV

SEQ ID NO: 97576 - protein, 27 aa, Artificial Sequence
  Cyclic GFR-binding peptide
EPISMLYLDEYDKVVKFKYEDSANNVV

SEQ ID NO: 97577 - protein, 27 aa, Artificial Sequence
  Cyclic GFR-binding peptide
EPISILYLDAANNVVKFKYEDSANNVV

SEQ ID NO: 97578 - protein, 27 aa, Artificial Sequence
  Cyclic GFR-binding peptide
SPISMLYIDENEKVVYKQYEDSANNVV

SEQ ID NO: 97579 - protein, 27 aa, Artificial Sequence
  Cyclic GFR-binding peptide
SPISILYIIGKTPKIYKQYEDSANNVV

SEQ ID NO: 97580 - protein, 27 aa, Artificial Sequence
  Cyclic GFR-binding peptide
NAISILYFDAANNVVLKKYRDSANNVV

SEQ ID NO: 97581 - protein, 27 aa, Artificial Sequence
  Cyclic GFR-binding peptide
SPISILYKDAANNVVLKYHYDSANNVV

SEQ ID NO: 97582 - protein, 27 aa, Artificial Sequence
  Cyclic GFR-binding peptide
EPISVLYLDSSNNVIKFKYEDSANNVV

SEQ ID NO: 97583 - protein, 27 aa, Artificial Sequence
  Cyclic GFR-binding peptide
SPISVLYIDDSSNVIYKQYEDSANNVV

SEQ ID NO: 97584 - protein, 27 aa, Artificial Sequence
  Cyclic GFR-binding peptide
EPISVLYLDDSSNVIKFKYEDSANNVV

SEQ ID NO: 97585 - protein, 27 aa, Artificial Sequence
  Cyclic GFR-binding peptide
EPISILYLVGRKPKVKFKYEDSANNVV

SEQ ID NO: 97586 - protein, 27 aa, Artificial Sequence
  Cyclic GFR-binding peptide
SPISILYIDKGVVTYYKQYEDSANNVV

SEQ ID NO: 97587 - protein, 27 aa, Artificial Sequence
  Cyclic GFR-binding peptide
EPISMLYLDENEKVVKFKYEDSANNVV

SEQ ID NO: 97588 - protein, 27 aa, Artificial Sequence
  Cyclic GFR-binding peptide
SPISVLYIDSSNNVIYKQYEDSANNVV

SEQ ID NO: 97589 - protein, 27 aa, Artificial Sequence
  Cyclic GFR-binding peptide
EPISILYLDKGVVTYKFKYEDSANNVV

SEQ ID NO: 97590 - protein, 27 aa, Artificial Sequence
  Cyclic GFR-binding peptide
DSANNVVPIKGYIIQQKDNFYLMNIPS

SEQ ID NO: 97591 - protein, 27 aa, Artificial Sequence
  Cyclic GFR-binding peptide
DSANNVVPIKGYVVKDYEDFYLMNIPS

SEQ ID NO: 97592 - protein, 27 aa, Artificial Sequence
  Cyclic GFR-binding peptide
DSANNVVPIKGYIVNSSDDFYLVNIPS

SEQ ID NO: 97593 - protein, 27 aa, Artificial Sequence
  Cyclic GFR-binding peptide
DSANNVVPIKGYVVNNAADFYLINIPS

SEQ ID NO: 97594 - protein, 27 aa, Artificial Sequence
  Cyclic GFR-binding peptide
DSANNVVPIKGYYTVVGKDFYLINIPS

SEQ ID NO: 97595 - protein, 27 aa, Artificial Sequence
  Cyclic GFR-binding peptide
DSANNVVPIKGYLLVRGNDFYLMNIPS

SEQ ID NO: 97596 - protein, 27 aa, Artificial Sequence
  Cyclic GFR-binding peptide
DSANNVVPIKGYVVKENEDFYLMNIPS

SEQ ID NO: 97597 - protein, 27 aa, Artificial Sequence
  Cyclic GFR-binding peptide
DSANNVVPIKGYVVNNASDFYLINIPS

SEQ ID NO: 97598 - protein, 27 aa, Artificial Sequence
  Cyclic GFR-binding peptide
DSANNVVPIKGYTPVGMDDFYLVNIPS

SEQ ID NO: 97599 - protein, 27 aa, Artificial Sequence
  Cyclic GFR-binding peptide
DSANNVVPIKGYIVNNSSDFYLVNIPS

SEQ ID NO: 97600 - protein, 27 aa, Artificial Sequence
  Cyclic GFR-binding peptide
SPINMLYFNDKQQIIYGKIPDSANNVV

SEQ ID NO: 97601 - protein, 27 aa, Artificial Sequence
  Cyclic GFR-binding peptide
SPINMLYFDEYDKVVYGKIPDSANNVV

SEQ ID NO: 97602 - protein, 27 aa, Artificial Sequence
  Cyclic GFR-binding peptide
SPINVLYFDDSSNVIYGKIPDSANNVV

SEQ ID NO: 97603 - protein, 27 aa, Artificial Sequence
  Cyclic GFR-binding peptide
SPINILYFDAANNVVYGKIPDSANNVV

SEQ ID NO: 97604 - protein, 27 aa, Artificial Sequence
  Cyclic GFR-binding peptide
SPINILYFDKGVVTYYGKIPDSANNVV

SEQ ID NO: 97605 - protein, 27 aa, Artificial Sequence
  Cyclic GFR-binding peptide
SPINMLYFDNGRVLLYGKIPDSANNVV

SEQ ID NO: 97606 - protein, 27 aa, Artificial Sequence
  Cyclic GFR-binding peptide
SPINMLYFDENEKVVYGKIPDSANNVV

SEQ ID NO: 97607 - protein, 27 aa, Artificial Sequence
  Cyclic GFR-binding peptide
SPINILYFDSANNVVYGKIPDSANNVV

SEQ ID NO: 97608 - protein, 27 aa, Artificial Sequence
  Cyclic GFR-binding peptide
SPINVLYFDDMGVPTYGKIPDSANNVV

SEQ ID NO: 97609 - protein, 27 aa, Artificial Sequence
  Cyclic GFR-binding peptide
SPINVLYFDSSNNVIYGKIPDSANNVV

SEQ ID NO: 97610 - protein, 27 aa, Artificial Sequence
  Cyclic GFR-binding peptide
DSANNVVEYQKYVVNNASDIYLISIPS

SEQ ID NO: 97611 - protein, 27 aa, Artificial Sequence
  Cyclic GFR-binding peptide
DSANNVVEYQKYIIQQKDNIYLMSIPS

SEQ ID NO: 97612 - protein, 27 aa, Artificial Sequence
  Cyclic GFR-binding peptide
DSANNVVEYQKYLLVRGNDIYLMSIPS

SEQ ID NO: 97613 - protein, 27 aa, Artificial Sequence
  Cyclic GFR-binding peptide
SPISILYIDSANNVVYKQYEDSANNVV

SEQ ID NO: 97614 - protein, 27 aa, Artificial Sequence
  Cyclic GFR-binding peptide
SPISMLYINDKQQIIYKQYEDSANNVV

SEQ ID NO: 97615 - protein, 27 aa, Artificial Sequence
  Cyclic GFR-binding peptide
SPISMLYIDNGRVLLYKQYEDSANNVV

SEQ ID NO: 97616 - protein, 27 aa, Artificial Sequence
  Cyclic GFR-binding peptide
DSANNVVPYVKLYTVVGKDFFLISLSS

SEQ ID NO: 97617 - protein, 27 aa, Artificial Sequence
  Cyclic GFR-binding peptide
DSANNVVPYVKLIKPTKGIFFLISLSS

SEQ ID NO: 97618 - protein, 27 aa, Artificial Sequence
  Cyclic GFR-binding peptide
DSANNVVPYVKLIIQQKDNFFLMSLSS

SEQ ID NO: 97619 - protein, 27 aa, Artificial Sequence
  Cyclic GFR-binding peptide
DSANNVVPYVKLIVNSSDDFFLVSLSS

SEQ ID NO: 97620 - protein, 27 aa, Artificial Sequence
  Cyclic GFR-binding peptide
DSANNVVPYVKLVKPKRGVFFLISLSS

SEQ ID NO: 97621 - protein, 27 aa, Artificial Sequence
  Cyclic GFR-binding peptide
DSANNVVPYVKLVKPTRGVFFLISLSS

SEQ ID NO: 97622 - protein, 27 aa, Artificial Sequence
  Cyclic GFR-binding peptide
DSANNVVPYVKLTPVGMDDFFLVSLSS

SEQ ID NO: 97623 - protein, 29 aa, Artificial Sequence
  Cyclic GFR-binding peptide
DSANNVVPYVKLHQGQHPKIRFFLMSLSS

SEQ ID NO: 97624 - protein, 27 aa, Artificial Sequence
  Cyclic GFR-binding peptide
DSANNVVPYVKLVVNKNEDFFLISLSS

SEQ ID NO: 97625 - protein, 27 aa, Artificial Sequence
  Cyclic GFR-binding peptide
DSANNVVPYVKLVVNNASDFFLISLSS

SEQ ID NO: 97626 - protein, 27 aa, Artificial Sequence
  Cyclic GFR-binding peptide
DSANNVVPYVKLVVKENEDFFLMSLSS

SEQ ID NO: 97627 - protein, 27 aa, Artificial Sequence
  Cyclic GFR-binding peptide
DSANNVVPYVKLIVNNSSDFFLVSLSS

SEQ ID NO: 97628 - protein, 29 aa, Artificial Sequence
  Cyclic GFR-binding peptide
DSANNVVPYVKLLKPKKRVYEFFLVSLSS

SEQ ID NO: 97629 - protein, 27 aa, Artificial Sequence
  Cyclic GFR-binding peptide
DSANNVVPYVKLLLVRGNDFFLMSLSS

SEQ ID NO: 97630 - protein, 27 aa, Artificial Sequence
  Cyclic GFR-binding peptide
DSANNVVPYVKLVVKDYEDFFLMSLSS

SEQ ID NO: 97631 - protein, 27 aa, Artificial Sequence
  Cyclic GFR-binding peptide
DSANNVVPYVKLVVNNAADFFLISLSS

SEQ ID NO: 97632 - protein, 27 aa, Artificial Sequence
  Cyclic GFR-binding peptide
SSLSILFFDKGVVTYLKVYPDSANNVV

SEQ ID NO: 97633 - protein, 27 aa, Artificial Sequence
  Cyclic GFR-binding peptide
SSLSILFFIGKTPKILKVYPDSANNVV

SEQ ID NO: 97634 - protein, 27 aa, Artificial Sequence
  Cyclic GFR-binding peptide
SSLSMLFFNDKQQIILKVYPDSANNVV

SEQ ID NO: 97635 - protein, 27 aa, Artificial Sequence
  Cyclic GFR-binding peptide
SSLSVLFFDDSSNVILKVYPDSANNVV

SEQ ID NO: 97636 - protein, 27 aa, Artificial Sequence
  Cyclic GFR-binding peptide
SSLSILFFVGRKPKVLKVYPDSANNVV

SEQ ID NO: 97637 - protein, 27 aa, Artificial Sequence
  Cyclic GFR-binding peptide
SSLSILFFVGRTPKVLKVYPDSANNVV

SEQ ID NO: 97638 - protein, 27 aa, Artificial Sequence
  Cyclic GFR-binding peptide
SSLSVLFFDDMGVPTLKVYPDSANNVV

SEQ ID NO: 97639 - protein, 29 aa, Artificial Sequence
  Cyclic GFR-binding peptide
SSLSMLFFRIKPHQGQHLKVYPDSANNVV

SEQ ID NO: 97640 - protein, 27 aa, Artificial Sequence
  Cyclic GFR-binding peptide
SSLSILFFDENKNVVLKVYPDSANNVV

SEQ ID NO: 97641 - protein, 27 aa, Artificial Sequence
  Cyclic GFR-binding peptide
SSLSILFFDSANNVVLKVYPDSANNVV

SEQ ID NO: 97642 - protein, 27 aa, Artificial Sequence
  Cyclic GFR-binding peptide
SSLSMLFFDENEKVVLKVYPDSANNVV

SEQ ID NO: 97643 - protein, 27 aa, Artificial Sequence
  Cyclic GFR-binding peptide
SSLSVLFFDSSNNVILKVYPDSANNVV

SEQ ID NO: 97644 - protein, 29 aa, Artificial Sequence
  Cyclic GFR-binding peptide
SSLSVLFFEYVRKKPKLLKVYPDSANNVV

SEQ ID NO: 97645 - protein, 27 aa, Artificial Sequence
  Cyclic GFR-binding peptide
SSLSMLFFDNGRVLLLKVYPDSANNVV

SEQ ID NO: 97646 - protein, 27 aa, Artificial Sequence
  Cyclic GFR-binding peptide
SSLSMLFFDEYDKVVLKVYPDSANNVV

SEQ ID NO: 97647 - protein, 27 aa, Artificial Sequence
  Cyclic GFR-binding peptide
SSLSILFFDAANNVVLKVYPDSANNVV

SEQ ID NO: 97648 - protein, 27 aa, Artificial Sequence
  Cyclic GFR-binding peptide
DSANNVVSMEGIIVNSSDDMIQVTINS

SEQ ID NO: 97649 - protein, 27 aa, Artificial Sequence
  Cyclic GFR-binding peptide
DSANNVVVTAKKVVKENEDIKRMQVPR

SEQ ID NO: 97650 - protein, 27 aa, Artificial Sequence
  Cyclic GFR-binding peptide
DSANNVVSMEGIVVKDYEDMIQMTINS

SEQ ID NO: 97651 - protein, 27 aa, Artificial Sequence
  Cyclic GFR-binding peptide
DSANNVVVTAKKIKPTKGIIKRIQVPR

SEQ ID NO: 97652 - protein, 27 aa, Artificial Sequence
  Cyclic GFR-binding peptide
DSANNVVSMEGIVKPTRGVMIQITINS

SEQ ID NO: 97653 - protein, 29 aa, Artificial Sequence
  Cyclic GFR-binding peptide
DSANNVVNSLQEFIPKKRVIEYYVVPLPE

SEQ ID NO: 97654 - protein, 27 aa, Artificial Sequence
  Cyclic GFR-binding peptide
DSANNVVVQVEKVKPKRGVVKAIKVSR

SEQ ID NO: 97655 - protein, 27 aa, Artificial Sequence
  Cyclic GFR-binding peptide
DSANNVVVQVEKVVKENEDVKAMKVSR

SEQ ID NO: 97656 - protein, 27 aa, Artificial Sequence
  Cyclic GFR-binding peptide
DSANNVVVTAKKIVNSSDDIKRVQVPR

SEQ ID NO: 97657 - protein, 27 aa, Artificial Sequence
  Cyclic GFR-binding peptide
DSANNVVVQVEKIKPTKGIVKAIKVSR

SEQ ID NO: 97658 - protein, 29 aa, Artificial Sequence
  Cyclic GFR-binding peptide
DSANNVVNSLQEFIPKKRVIEYYLVTLPE

SEQ ID NO: 97659 - protein, 27 aa, Artificial Sequence
  Cyclic GFR-binding peptide
DSANNVVVQVEKIVNSSDDVKAVKVSR

SEQ ID NO: 97660 - protein, 27 aa, Artificial Sequence
  Cyclic GFR-binding peptide
DSANNVVVTAKKVKPKRGVIKRIQVPR

SEQ ID NO: 97661 - protein, 27 aa, Artificial Sequence
  Cyclic GFR-binding peptide
DSANNVVVQVEKVKPTRGVVKAIKVSR

SEQ ID NO: 97662 - protein, 27 aa, Artificial Sequence
  Cyclic GFR-binding peptide
DSANNVVVTAKKVKPTRGVIKRIQVPR

SEQ ID NO: 97663 - protein, 29 aa, Artificial Sequence
  Cyclic GFR-binding peptide
DSANNVVNSLQELKPKKRVYEYYLVTLPE

SEQ ID NO: 97664 - protein, 27 aa, Artificial Sequence
  Cyclic GFR-binding peptide
DSANNVVSMEGIVKPKRGVMIQITINS

SEQ ID NO: 97665 - protein, 27 aa, Artificial Sequence
  Cyclic GFR-binding peptide
DSANNVVSMEGIVVKENEDMIQMTINS

SEQ ID NO: 97666 - protein, 27 aa, Artificial Sequence
  Cyclic GFR-binding peptide
DSANNVVSMEGIIKPTKGIMIQITINS

SEQ ID NO: 97667 - protein, 29 aa, Artificial Sequence
  Cyclic GFR-binding peptide
DSANNVVNSLQEHQGQHPKIRYYLMTLPE

SEQ ID NO: 97668 - protein, 27 aa, Artificial Sequence
  Cyclic GFR-binding peptide
DSANNVVVTAKKVVKDYEDIKRMQVPR

SEQ ID NO: 97669 - protein, 29 aa, Artificial Sequence
  Cyclic GFR-binding peptide
DSANNVVNSLQEHQGQHPKIRYYVMPLPE

SEQ ID NO: 97670 - protein, 29 aa, Artificial Sequence
  Cyclic GFR-binding peptide
DSANNVVNSLQELKPKKRVYEYYVVPLPE

SEQ ID NO: 97671 - protein, 27 aa, Artificial Sequence
  Cyclic GFR-binding peptide
DSANNVVVQVEKVVKDYEDVKAMKVSR

SEQ ID NO: 97672 - protein, 27 aa, Artificial Sequence
  Cyclic GFR-binding peptide
SNITVQIMDDSSNVIIGEMSDSANNVV

SEQ ID NO: 97673 - protein, 27 aa, Artificial Sequence
  Cyclic GFR-binding peptide
RPVQMRKIDENEKVVKKATVDSANNVV

SEQ ID NO: 97674 - protein, 27 aa, Artificial Sequence
  Cyclic GFR-binding peptide
SNITMQIMDEYDKVVIGEMSDSANNVV

SEQ ID NO: 97675 - protein, 27 aa, Artificial Sequence
  Cyclic GFR-binding peptide
RPVQIRKIIGKTPKIKKATVDSANNVV

SEQ ID NO: 97676 - protein, 27 aa, Artificial Sequence
  Cyclic GFR-binding peptide
SNITIQIMVGRTPKVIGEMSDSANNVV

SEQ ID NO: 97677 - protein, 29 aa, Artificial Sequence
  Cyclic GFR-binding peptide
EPLPVVYYEIVRKKPIFEQLSNDSANNVV

SEQ ID NO: 97678 - protein, 27 aa, Artificial Sequence
  Cyclic GFR-binding peptide
RSVKIAKVVGRKPKVKEVQVDSANNVV

SEQ ID NO: 97679 - protein, 27 aa, Artificial Sequence
  Cyclic GFR-binding peptide
RSVKMAKVDENEKVVKEVQVDSANNVV

SEQ ID NO: 97680 - protein, 27 aa, Artificial Sequence
  Cyclic GFR-binding peptide
RPVQVRKIDDSSNVIKKATVDSANNVV

SEQ ID NO: 97681 - protein, 27 aa, Artificial Sequence
  Cyclic GFR-binding peptide
RSVKIAKVIGKTPKIKEVQVDSANNVV

SEQ ID NO: 97682 - protein, 29 aa, Artificial Sequence
  Cyclic GFR-binding peptide
EPLTVLYYEIVRKKPIFEQLSNDSANNVV

SEQ ID NO: 97683 - protein, 27 aa, Artificial Sequence
  Cyclic GFR-binding peptide
RSVKVAKVDDSSNVIKEVQVDSANNVV

SEQ ID NO: 97684 - protein, 27 aa, Artificial Sequence
  Cyclic GFR-binding peptide
RPVQIRKIVGRKPKVKKATVDSANNVV

SEQ ID NO: 97685 - protein, 27 aa, Artificial Sequence
  Cyclic GFR-binding peptide
RSVKIAKVVGRTPKVKEVQVDSANNVV

SEQ ID NO: 97686 - protein, 27 aa, Artificial Sequence
  Cyclic GFR-binding peptide
RPVQIRKIVGRTPKVKKATVDSANNVV

SEQ ID NO: 97687 - protein, 29 aa, Artificial Sequence
  Cyclic GFR-binding peptide
EPLTVLYYEYVRKKPKLEQLSNDSANNVV

SEQ ID NO: 97688 - protein, 27 aa, Artificial Sequence
  Cyclic GFR-binding peptide
SNITIQIMVGRKPKVIGEMSDSANNVV

SEQ ID NO: 97689 - protein, 27 aa, Artificial Sequence
  Cyclic GFR-binding peptide
SNITMQIMDENEKVVIGEMSDSANNVV

SEQ ID NO: 97690 - protein, 27 aa, Artificial Sequence
  Cyclic GFR-binding peptide
SNITIQIMIGKTPKIIGEMSDSANNVV

SEQ ID NO: 97691 - protein, 29 aa, Artificial Sequence
  Cyclic GFR-binding peptide
EPLTMLYYRIKPHQGQHEQLSNDSANNVV

SEQ ID NO: 97692 - protein, 27 aa, Artificial Sequence
  Cyclic GFR-binding peptide
RPVQMRKIDEYDKVVKKATVDSANNVV

SEQ ID NO: 97693 - protein, 29 aa, Artificial Sequence
  Cyclic GFR-binding peptide
EPLPMVYYRIKPHQGQHEQLSNDSANNVV

SEQ ID NO: 97694 - protein, 29 aa, Artificial Sequence
  Cyclic GFR-binding peptide
EPLPVVYYEYVRKKPKLEQLSNDSANNVV

SEQ ID NO: 97695 - protein, 27 aa, Artificial Sequence
  Cyclic GFR-binding peptide
RSVKMAKVDEYDKVVKEVQVDSANNVV

SEQ ID NO: 97696 - protein, 27 aa, Artificial Sequence
  Cyclic GFR-binding peptide
DSANNVVRYKKLIIQQKDNFYLMSIAN

SEQ ID NO: 97697 - protein, 27 aa, Artificial Sequence
  Cyclic GFR-binding peptide
DSANNVVRYKKLLLVRGNDFYLMSIAN

SEQ ID NO: 97698 - protein, 27 aa, Artificial Sequence
  Cyclic GFR-binding peptide
NAISMLYFNDKQQIILKKYRDSANNVV

SEQ ID NO: 97699 - protein, 27 aa, Artificial Sequence
  Cyclic GFR-binding peptide
NAISMLYFDNGRVLLLKKYRDSANNVV

SEQ ID NO: 97700 - protein, 27 aa, Artificial Sequence
  Cyclic GFR-binding peptide
DSANNVVEYKFKVVNKNEDLYLISIPE

SEQ ID NO: 97701 - protein, 27 aa, Artificial Sequence
  Cyclic GFR-binding peptide
DSANNVVPIKGYVKPTRGVFYLINIPS

SEQ ID NO: 97702 - protein, 27 aa, Artificial Sequence
  Cyclic GFR-binding peptide
DSANNVVEYKFKLLVRGNDLYLMSIPE

SEQ ID NO: 97703 - protein, 27 aa, Artificial Sequence
  Cyclic GFR-binding peptide
DSANNVVYHYKLVVNKNEDKYLISIPS

SEQ ID NO: 97704 - protein, 27 aa, Artificial Sequence
  Cyclic GFR-binding peptide
DSANNVVRHKRLLLVRGNDYYLMSTAS

SEQ ID NO: 97705 - protein, 27 aa, Artificial Sequence
  Cyclic GFR-binding peptide
DSANNVVYHYKLLLVRGNDKYLMSIPS

SEQ ID NO: 97706 - protein, 27 aa, Artificial Sequence
  Cyclic GFR-binding peptide
DSANNVVRHKRLVVNKNEDYYLISTAS

SEQ ID NO: 97707 - protein, 27 aa, Artificial Sequence
  Cyclic GFR-binding peptide
DSANNVVRYKKLVVNKNEDFYLISIAN

SEQ ID NO: 97708 - protein, 27 aa, Artificial Sequence
  Cyclic GFR-binding peptide
DSANNVVPIKGYVVNKNEDFYLINIPS

SEQ ID NO: 97709 - protein, 27 aa, Artificial Sequence
  Cyclic GFR-binding peptide
DSANNVVPIKGYIKPTKGIFYLINIPS

SEQ ID NO: 97710 - protein, 27 aa, Artificial Sequence
  Cyclic GFR-binding peptide
DSANNVVRHKRLYTVVGKDYYLISTAS

SEQ ID NO: 97711 - protein, 27 aa, Artificial Sequence
  Cyclic GFR-binding peptide
DSANNVVEYKFKVVNNASDLYLISIPE

SEQ ID NO: 97712 - protein, 27 aa, Artificial Sequence
  Cyclic GFR-binding peptide
DSANNVVRHKRLIIQQKDNYYLMSTAS

SEQ ID NO: 97713 - protein, 27 aa, Artificial Sequence
  Cyclic GFR-binding peptide
DSANNVVEYKFKIIQQKDNLYLMSIPE

SEQ ID NO: 97714 - protein, 27 aa, Artificial Sequence
  Cyclic GFR-binding peptide
DSANNVVPIKGYVKPKRGVFYLINIPS

SEQ ID NO: 97715 - protein, 27 aa, Artificial Sequence
  Cyclic GFR-binding peptide
DSANNVVRHKRLVVNNASDYYLISTAS

SEQ ID NO: 97716 - protein, 27 aa, Artificial Sequence
  Cyclic GFR-binding peptide
DSANNVVYHYKLVVNNASDKYLISIPS

SEQ ID NO: 97717 - protein, 27 aa, Artificial Sequence
  Cyclic GFR-binding peptide
DSANNVVYHYKLIIQQKDNKYLMSIPS

SEQ ID NO: 97718 - protein, 27 aa, Artificial Sequence
  Cyclic GFR-binding peptide
DSANNVVRHKRLVVNNAADYYLISTAS

SEQ ID NO: 97719 - protein, 27 aa, Artificial Sequence
  Cyclic GFR-binding peptide
EPISILYLDENKNVVKFKYEDSANNVV

SEQ ID NO: 97720 - protein, 27 aa, Artificial Sequence
  Cyclic GFR-binding peptide
SPINILYFVGRTPKVYGKIPDSANNVV

SEQ ID NO: 97721 - protein, 27 aa, Artificial Sequence
  Cyclic GFR-binding peptide
EPISMLYLDNGRVLLKFKYEDSANNVV

SEQ ID NO: 97722 - protein, 27 aa, Artificial Sequence
  Cyclic GFR-binding peptide
SPISILYKDENKNVVLKYHYDSANNVV

SEQ ID NO: 97723 - protein, 27 aa, Artificial Sequence
  Cyclic GFR-binding peptide
SATSMLYYDNGRVLLLRKHRDSANNVV

SEQ ID NO: 97724 - protein, 27 aa, Artificial Sequence
  Cyclic GFR-binding peptide
SPISMLYKDNGRVLLLKYHYDSANNVV

SEQ ID NO: 97725 - protein, 27 aa, Artificial Sequence
  Cyclic GFR-binding peptide
SATSILYYDENKNVVLRKHRDSANNVV

SEQ ID NO: 97726 - protein, 27 aa, Artificial Sequence
  Cyclic GFR-binding peptide
NAISILYFDENKNVVLKKYRDSANNVV

SEQ ID NO: 97727 - protein, 27 aa, Artificial Sequence
  Cyclic GFR-binding peptide
SPINILYFDENKNVVYGKIPDSANNVV

SEQ ID NO: 97728 - protein, 27 aa, Artificial Sequence
  Cyclic GFR-binding peptide
SPINILYFIGKTPKIYGKIPDSANNVV

SEQ ID NO: 97729 - protein, 27 aa, Artificial Sequence
  Cyclic GFR-binding peptide
SATSILYYDKGVVTYLRKHRDSANNVV

SEQ ID NO: 97730 - protein, 27 aa, Artificial Sequence
  Cyclic GFR-binding peptide
EPISILYLDSANNVVKFKYEDSANNVV

SEQ ID NO: 97731 - protein, 27 aa, Artificial Sequence
  Cyclic GFR-binding peptide
SATSMLYYNDKQQIILRKHRDSANNVV

SEQ ID NO: 97732 - protein, 27 aa, Artificial Sequence
  Cyclic GFR-binding peptide
EPISMLYLNDKQQIIKFKYEDSANNVV

SEQ ID NO: 97733 - protein, 27 aa, Artificial Sequence
  Cyclic GFR-binding peptide
SPINILYFVGRKPKVYGKIPDSANNVV

SEQ ID NO: 97734 - protein, 27 aa, Artificial Sequence
  Cyclic GFR-binding peptide
SATSILYYDSANNVVLRKHRDSANNVV

SEQ ID NO: 97735 - protein, 27 aa, Artificial Sequence
  Cyclic GFR-binding peptide
SPISILYKDSANNVVLKYHYDSANNVV

SEQ ID NO: 97736 - protein, 27 aa, Artificial Sequence
  Cyclic GFR-binding peptide
SPISMLYKNDKQQIILKYHYDSANNVV

SEQ ID NO: 97737 - protein, 27 aa, Artificial Sequence
  Cyclic GFR-binding peptide
SATSILYYDAANNVVLRKHRDSANNVV

SEQ ID NO: 97738 - protein, 27 aa, Artificial Sequence
  Cyclic GFR-binding peptide
DSANNVVSMEGIIIQQKDNMIQMTINS

SEQ ID NO: 97739 - protein, 27 aa, Artificial Sequence
  Cyclic GFR-binding peptide
DSANNVVSMEGLVKPKRGVMIQITINS

SEQ ID NO: 97740 - protein, 27 aa, Artificial Sequence
  Cyclic GFR-binding peptide
DSANNVVSMEGLVVNNASDMIQITINS

SEQ ID NO: 97741 - protein, 27 aa, Artificial Sequence
  Cyclic GFR-binding peptide
DSANNVVSMEGILLVRGNDMIQMTINS

SEQ ID NO: 97742 - protein, 27 aa, Artificial Sequence
  Cyclic GFR-binding peptide
DSANNVVSMEGLIKPTKGIMIQITINS

SEQ ID NO: 97743 - protein, 27 aa, Artificial Sequence
  Cyclic GFR-binding peptide
DSANNVVSMEGLIVNSSDDMIQVTINS

SEQ ID NO: 97744 - protein, 27 aa, Artificial Sequence
  Cyclic GFR-binding peptide
DSANNVVSMEGIVVNNASDMIQITINS

SEQ ID NO: 97745 - protein, 27 aa, Artificial Sequence
  Cyclic GFR-binding peptide
DSANNVVSMEGLVVNNAADMIQITINS

SEQ ID NO: 97746 - protein, 27 aa, Artificial Sequence
  Cyclic GFR-binding peptide
DSANNVVSMEGLLLVRGNDMIQMTINS

SEQ ID NO: 97747 - protein, 27 aa, Artificial Sequence
  Cyclic GFR-binding peptide
DSANNVVSMEGLIIQQKDNMIQMTINS

SEQ ID NO: 97748 - protein, 27 aa, Artificial Sequence
  Cyclic GFR-binding peptide
DSANNVVSMEGIVVNNAADMIQITINS

SEQ ID NO: 97749 - protein, 27 aa, Artificial Sequence
  Cyclic GFR-binding peptide
DSANNVVSMEGLVKPTRGVMIQITINS

SEQ ID NO: 97750 - protein, 27 aa, Artificial Sequence
  Cyclic GFR-binding peptide
SNITMQIMNDKQQIIIGEMSDSANNVV

SEQ ID NO: 97751 - protein, 27 aa, Artificial Sequence
  Cyclic GFR-binding peptide
SNITIQIMVGRKPKVLGEMSDSANNVV

SEQ ID NO: 97752 - protein, 27 aa, Artificial Sequence
  Cyclic GFR-binding peptide
SNITIQIMDSANNVVLGEMSDSANNVV

SEQ ID NO: 97753 - protein, 27 aa, Artificial Sequence
  Cyclic GFR-binding peptide
SNITMQIMDNGRVLLIGEMSDSANNVV

SEQ ID NO: 97754 - protein, 27 aa, Artificial Sequence
  Cyclic GFR-binding peptide
SNITIQIMIGKTPKILGEMSDSANNVV

SEQ ID NO: 97755 - protein, 27 aa, Artificial Sequence
  Cyclic GFR-binding peptide
SNITVQIMDDSSNVILGEMSDSANNVV

SEQ ID NO: 97756 - protein, 27 aa, Artificial Sequence
  Cyclic GFR-binding peptide
SNITIQIMDSANNVVIGEMSDSANNVV

SEQ ID NO: 97757 - protein, 27 aa, Artificial Sequence
  Cyclic GFR-binding peptide
SNITIQIMDAANNVVLGEMSDSANNVV

SEQ ID NO: 97758 - protein, 27 aa, Artificial Sequence
  Cyclic GFR-binding peptide
SNITMQIMDNGRVLLLGEMSDSANNVV

SEQ ID NO: 97759 - protein, 27 aa, Artificial Sequence
  Cyclic GFR-binding peptide
SNITMQIMNDKQQIILGEMSDSANNVV

SEQ ID NO: 97760 - protein, 27 aa, Artificial Sequence
  Cyclic GFR-binding peptide
SNITIQIMDAANNVVIGEMSDSANNVV

SEQ ID NO: 97761 - protein, 27 aa, Artificial Sequence
  Cyclic GFR-binding peptide
SNITIQIMVGRTPKVLGEMSDSANNVV

SEQ ID NO: 97762 - protein, 27 aa, Artificial Sequence
  Cyclic GFR-binding peptide
DSANNVVQYNKLVVNKNEDLYLISIAS

SEQ ID NO: 97763 - protein, 27 aa, Artificial Sequence
  Cyclic GFR-binding peptide
DSANNVVQYNKLVVNNAADLYLISIAS

SEQ ID NO: 97764 - protein, 27 aa, Artificial Sequence
  Cyclic GFR-binding peptide
DSANNVVQYNKLIIQQKDNLYLMSIAS

SEQ ID NO: 97765 - protein, 27 aa, Artificial Sequence
  Cyclic GFR-binding peptide
DSANNVVQYNKLLLVRGNDLYLMSIAS

SEQ ID NO: 97766 - protein, 27 aa, Artificial Sequence
  Cyclic GFR-binding peptide
DSANNVVQYNKLYTVVGKDLYLISIAS

SEQ ID NO: 97767 - protein, 27 aa, Artificial Sequence
  Cyclic GFR-binding peptide
SAISILYLDENKNVVLKNYQDSANNVV

SEQ ID NO: 97768 - protein, 27 aa, Artificial Sequence
  Cyclic GFR-binding peptide
SAISILYLDAANNVVLKNYQDSANNVV

SEQ ID NO: 97769 - protein, 27 aa, Artificial Sequence
  Cyclic GFR-binding peptide
SAISMLYLNDKQQIILKNYQDSANNVV

SEQ ID NO: 97770 - protein, 27 aa, Artificial Sequence
  Cyclic GFR-binding peptide
SAISMLYLDNGRVLLLKNYQDSANNVV

SEQ ID NO: 97771 - protein, 27 aa, Artificial Sequence
  Cyclic GFR-binding peptide
SAISILYLDKGVVTYLKNYQDSANNVV

SEQ ID NO: 97772 - protein, 27 aa, Artificial Sequence
  Cyclic GFR-binding peptide
DNGRVLLRYKKLIKPTKGIFYLISIAN

SEQ ID NO: 97773 - protein, 29 aa, Artificial Sequence
  Cyclic GFR-binding peptide
DNGRVLLRHKRLFIPKKRVIEYYLVSTAS

SEQ ID NO: 97774 - protein, 27 aa, Artificial Sequence
  Cyclic GFR-binding peptide
DNGRVLLYHYKLVVKDYEDKYLMSIPS

SEQ ID NO: 97775 - protein, 27 aa, Artificial Sequence
  Cyclic GFR-binding peptide
DNGRVLLQYNKLIVNNSSDLYLVSIAS

SEQ ID NO: 97776 - protein, 27 aa, Artificial Sequence
  Cyclic GFR-binding peptide
DNGRVLLRYKKLVVKDYEDFYLMSIAN

SEQ ID NO: 97777 - protein, 27 aa, Artificial Sequence
  Cyclic GFR-binding peptide
DNGRVLLRYKKLVKPTRGVFYLISIAN

SEQ ID NO: 97778 - protein, 27 aa, Artificial Sequence
  Cyclic GFR-binding peptide
DNGRVLLRHKRLVVKENEDYYLMSTAS

SEQ ID NO: 97779 - protein, 27 aa, Artificial Sequence
  Cyclic GFR-binding peptide
DNGRVLLYHYKLIKPTKGIKYLISIPS

SEQ ID NO: 97780 - protein, 29 aa, Artificial Sequence
  Cyclic GFR-binding peptide
DNGRVLLRYKKLFIPKKRVIEFYLVSIAN

SEQ ID NO: 97781 - protein, 27 aa, Artificial Sequence
  Cyclic GFR-binding peptide
DNGRVLLYHYKLVVKENEDKYLMSIPS

SEQ ID NO: 97782 - protein, 27 aa, Artificial Sequence
  Cyclic GFR-binding peptide
DNGRVLLRHKRLVKPKRGVYYLISTAS

SEQ ID NO: 97783 - protein, 27 aa, Artificial Sequence
  Cyclic GFR-binding peptide
DNGRVLLYHYKLVKPKRGVKYLISIPS

SEQ ID NO: 97784 - protein, 29 aa, Artificial Sequence
  Cyclic GFR-binding peptide
DNGRVLLQYNKLFIPKKRVIELYLVSIAS

SEQ ID NO: 97785 - protein, 27 aa, Artificial Sequence
  Cyclic GFR-binding peptide
DNGRVLLQYNKLVKPTRGVLYLISIAS

SEQ ID NO: 97786 - protein, 27 aa, Artificial Sequence
  Cyclic GFR-binding peptide
DNGRVLLRYKKLVVKENEDFYLMSIAN

SEQ ID NO: 97787 - protein, 27 aa, Artificial Sequence
  Cyclic GFR-binding peptide
DNGRVLLQYNKLTPVGMDDLYLVSIAS

SEQ ID NO: 97788 - protein, 27 aa, Artificial Sequence
  Cyclic GFR-binding peptide
DNGRVLLRYKKLTPVGMDDFYLVSIAN

SEQ ID NO: 97789 - protein, 27 aa, Artificial Sequence
  Cyclic GFR-binding peptide
DNGRVLLRYKKLVKPKRGVFYLISIAN

SEQ ID NO: 97790 - protein, 27 aa, Artificial Sequence
  Cyclic GFR-binding peptide
DNGRVLLQYNKLVVKENEDLYLMSIAS

SEQ ID NO: 97791 - protein, 27 aa, Artificial Sequence
  Cyclic GFR-binding peptide
DNGRVLLYHYKLIVNSSDDKYLVSIPS

SEQ ID NO: 97792 - protein, 27 aa, Artificial Sequence
  Cyclic GFR-binding peptide
DNGRVLLQYNKLVKPKRGVLYLISIAS

SEQ ID NO: 97793 - protein, 27 aa, Artificial Sequence
  Cyclic GFR-binding peptide
DNGRVLLRYKKLIVNNSSDFYLVSIAN

SEQ ID NO: 97794 - protein, 27 aa, Artificial Sequence
  Cyclic GFR-binding peptide
DNGRVLLRYKKLIVNSSDDFYLVSIAN

SEQ ID NO: 97795 - protein, 27 aa, Artificial Sequence
  Cyclic GFR-binding peptide
DNGRVLLRHKRLVKPTRGVYYLISTAS

SEQ ID NO: 97796 - protein, 29 aa, Artificial Sequence
  Cyclic GFR-binding peptide
DNGRVLLYHYKLFIPKKRVIEKYLVSIPS

SEQ ID NO: 97797 - protein, 27 aa, Artificial Sequence
  Cyclic GFR-binding peptide
DNGRVLLRHKRLIKPTKGIYYLISTAS

SEQ ID NO: 97798 - protein, 27 aa, Artificial Sequence
  Cyclic GFR-binding peptide
DNGRVLLRHKRLTPVGMDDYYLVSTAS

SEQ ID NO: 97799 - protein, 27 aa, Artificial Sequence
  Cyclic GFR-binding peptide
DNGRVLLYHYKLTPVGMDDKYLVSIPS

SEQ ID NO: 97800 - protein, 27 aa, Artificial Sequence
  Cyclic GFR-binding peptide
DNGRVLLYHYKLIVNNSSDKYLVSIPS

SEQ ID NO: 97801 - protein, 27 aa, Artificial Sequence
  Cyclic GFR-binding peptide
DNGRVLLRHKRLIVNNSSDYYLVSTAS

SEQ ID NO: 97802 - protein, 27 aa, Artificial Sequence
  Cyclic GFR-binding peptide
DNGRVLLYHYKLVKPTRGVKYLISIPS

SEQ ID NO: 97803 - protein, 27 aa, Artificial Sequence
  Cyclic GFR-binding peptide
DNGRVLLRHKRLIVNSSDDYYLVSTAS

SEQ ID NO: 97804 - protein, 27 aa, Artificial Sequence
  Cyclic GFR-binding peptide
DNGRVLLRHKRLVVKDYEDYYLMSTAS

SEQ ID NO: 97805 - protein, 27 aa, Artificial Sequence
  Cyclic GFR-binding peptide
DNGRVLLQYNKLIKPTKGILYLISIAS

SEQ ID NO: 97806 - protein, 27 aa, Artificial Sequence
  Cyclic GFR-binding peptide
DNGRVLLQYNKLVVKDYEDLYLMSIAS

SEQ ID NO: 97807 - protein, 27 aa, Artificial Sequence
  Cyclic GFR-binding peptide
DNGRVLLQYNKLIVNSSDDLYLVSIAS

SEQ ID NO: 97808 - protein, 27 aa, Artificial Sequence
  Cyclic GFR-binding peptide
NAISILYFIGKTPKILKKYRDNGRVLL

SEQ ID NO: 97809 - protein, 29 aa, Artificial Sequence
  Cyclic GFR-binding peptide
SATSVLYYEIVRKKPIFLRKHRDNGRVLL

SEQ ID NO: 97810 - protein, 27 aa, Artificial Sequence
  Cyclic GFR-binding peptide
SPISMLYKDEYDKVVLKYHYDNGRVLL

SEQ ID NO: 97811 - protein, 27 aa, Artificial Sequence
  Cyclic GFR-binding peptide
SAISVLYLDSSNNVILKNYQDNGRVLL

SEQ ID NO: 97812 - protein, 27 aa, Artificial Sequence
  Cyclic GFR-binding peptide
NAISMLYFDEYDKVVLKKYRDNGRVLL

SEQ ID NO: 97813 - protein, 27 aa, Artificial Sequence
  Cyclic GFR-binding peptide
NAISILYFVGRTPKVLKKYRDNGRVLL

SEQ ID NO: 97814 - protein, 27 aa, Artificial Sequence
  Cyclic GFR-binding peptide
SATSMLYYDENEKVVLRKHRDNGRVLL

SEQ ID NO: 97815 - protein, 27 aa, Artificial Sequence
  Cyclic GFR-binding peptide
SPISILYKIGKTPKILKYHYDNGRVLL

SEQ ID NO: 97816 - protein, 29 aa, Artificial Sequence
  Cyclic GFR-binding peptide
NAISVLYFEIVRKKPIFLKKYRDNGRVLL

SEQ ID NO: 97817 - protein, 27 aa, Artificial Sequence
  Cyclic GFR-binding peptide
SPISMLYKDENEKVVLKYHYDNGRVLL

SEQ ID NO: 97818 - protein, 27 aa, Artificial Sequence
  Cyclic GFR-binding peptide
SATSILYYVGRKPKVLRKHRDNGRVLL

SEQ ID NO: 97819 - protein, 27 aa, Artificial Sequence
  Cyclic GFR-binding peptide
SPISILYKVGRKPKVLKYHYDNGRVLL

SEQ ID NO: 97820 - protein, 29 aa, Artificial Sequence
  Cyclic GFR-binding peptide
SAISVLYLEIVRKKPIFLKNYQDNGRVLL

SEQ ID NO: 97821 - protein, 27 aa, Artificial Sequence
  Cyclic GFR-binding peptide
SAISILYLVGRTPKVLKNYQDNGRVLL

SEQ ID NO: 97822 - protein, 27 aa, Artificial Sequence
  Cyclic GFR-binding peptide
NAISMLYFDENEKVVLKKYRDNGRVLL

SEQ ID NO: 97823 - protein, 27 aa, Artificial Sequence
  Cyclic GFR-binding peptide
SAISVLYLDDMGVPTLKNYQDNGRVLL

SEQ ID NO: 97824 - protein, 27 aa, Artificial Sequence
  Cyclic GFR-binding peptide
NAISVLYFDDMGVPTLKKYRDNGRVLL

SEQ ID NO: 97825 - protein, 27 aa, Artificial Sequence
  Cyclic GFR-binding peptide
NAISILYFVGRKPKVLKKYRDNGRVLL

SEQ ID NO: 97826 - protein, 27 aa, Artificial Sequence
  Cyclic GFR-binding peptide
SAISMLYLDENEKVVLKNYQDNGRVLL

SEQ ID NO: 97827 - protein, 27 aa, Artificial Sequence
  Cyclic GFR-binding peptide
SPISVLYKDDSSNVILKYHYDNGRVLL

SEQ ID NO: 97828 - protein, 27 aa, Artificial Sequence
  Cyclic GFR-binding peptide
SAISILYLVGRKPKVLKNYQDNGRVLL

SEQ ID NO: 97829 - protein, 27 aa, Artificial Sequence
  Cyclic GFR-binding peptide
NAISVLYFDSSNNVILKKYRDNGRVLL

SEQ ID NO: 97830 - protein, 27 aa, Artificial Sequence
  Cyclic GFR-binding peptide
NAISVLYFDDSSNVILKKYRDNGRVLL

SEQ ID NO: 97831 - protein, 27 aa, Artificial Sequence
  Cyclic GFR-binding peptide
SATSILYYVGRTPKVLRKHRDNGRVLL

SEQ ID NO: 97832 - protein, 29 aa, Artificial Sequence
  Cyclic GFR-binding peptide
SPISVLYKEIVRKKPIFLKYHYDNGRVLL

SEQ ID NO: 97833 - protein, 27 aa, Artificial Sequence
  Cyclic GFR-binding peptide
SATSILYYIGKTPKILRKHRDNGRVLL

SEQ ID NO: 97834 - protein, 27 aa, Artificial Sequence
  Cyclic GFR-binding peptide
SATSVLYYDDMGVPTLRKHRDNGRVLL

SEQ ID NO: 97835 - protein, 27 aa, Artificial Sequence
  Cyclic GFR-binding peptide
SPISVLYKDDMGVPTLKYHYDNGRVLL

SEQ ID NO: 97836 - protein, 27 aa, Artificial Sequence
  Cyclic GFR-binding peptide
SPISVLYKDSSNNVILKYHYDNGRVLL

SEQ ID NO: 97837 - protein, 27 aa, Artificial Sequence
  Cyclic GFR-binding peptide
SATSVLYYDSSNNVILRKHRDNGRVLL

SEQ ID NO: 97838 - protein, 27 aa, Artificial Sequence
  Cyclic GFR-binding peptide
SPISILYKVGRTPKVLKYHYDNGRVLL

SEQ ID NO: 97839 - protein, 27 aa, Artificial Sequence
  Cyclic GFR-binding peptide
SATSVLYYDDSSNVILRKHRDNGRVLL

SEQ ID NO: 97840 - protein, 27 aa, Artificial Sequence
  Cyclic GFR-binding peptide
SATSMLYYDEYDKVVLRKHRDNGRVLL

SEQ ID NO: 97841 - protein, 27 aa, Artificial Sequence
  Cyclic GFR-binding peptide
SAISILYLIGKTPKILKNYQDNGRVLL

SEQ ID NO: 97842 - protein, 27 aa, Artificial Sequence
  Cyclic GFR-binding peptide
SAISMLYLDEYDKVVLKNYQDNGRVLL

SEQ ID NO: 97843 - protein, 27 aa, Artificial Sequence
  Cyclic GFR-binding peptide
SAISVLYLDDSSNVILKNYQDNGRVLL

SEQ ID NO: 97844 - protein, 27 aa, Artificial Sequence
  Cyclic GFR-binding peptide
DNGRVLLNSLQEVVKDYEDYYLMTLPE

SEQ ID NO: 97845 - protein, 27 aa, Artificial Sequence
  Cyclic GFR-binding peptide
DNGRVLLNSLQEIKPTKGIYYVIPLPE

SEQ ID NO: 97846 - protein, 27 aa, Artificial Sequence
  Cyclic GFR-binding peptide
DNGRVLLNSLQEVKPKRGVYYLITLPE

SEQ ID NO: 97847 - protein, 27 aa, Artificial Sequence
  Cyclic GFR-binding peptide
DNGRVLLNSLQEVKPTRGVYYVIPLPE

SEQ ID NO: 97848 - protein, 27 aa, Artificial Sequence
  Cyclic GFR-binding peptide
DNGRVLLEYQKYIVNSSDDIFLVSIPS

SEQ ID NO: 97849 - protein, 27 aa, Artificial Sequence
  Cyclic GFR-binding peptide
DNGRVLLEYQKYVKPTRGVIFLISIPS

SEQ ID NO: 97850 - protein, 27 aa, Artificial Sequence
  Cyclic GFR-binding peptide
DNGRVLLNSLQEVVKENEDYYLMTLPE

SEQ ID NO: 97851 - protein, 27 aa, Artificial Sequence
  Cyclic GFR-binding peptide
DNGRVLLNSLQEVVNNASDYYLITLPE

SEQ ID NO: 97852 - protein, 27 aa, Artificial Sequence
  Cyclic GFR-binding peptide
DNGRVLLNSLQEVKPKRGVYYVIPLPE

SEQ ID NO: 97853 - protein, 27 aa, Artificial Sequence
  Cyclic GFR-binding peptide
DNGRVLLNSLQEVVNNASDYYVIPLPE

SEQ ID NO: 97854 - protein, 27 aa, Artificial Sequence
  Cyclic GFR-binding peptide
DNGRVLLNSLQEVKPTRGVYYLITLPE

SEQ ID NO: 97855 - protein, 27 aa, Artificial Sequence
  Cyclic GFR-binding peptide
DNGRVLLEYQKYIKPTKGIIFLISIPS

SEQ ID NO: 97856 - protein, 27 aa, Artificial Sequence
  Cyclic GFR-binding peptide
DNGRVLLEYQKYVVNNASDIFLISIPS

SEQ ID NO: 97857 - protein, 27 aa, Artificial Sequence
  Cyclic GFR-binding peptide
DNGRVLLNSLQEIVNSSDDYYVVPLPE

SEQ ID NO: 97858 - protein, 27 aa, Artificial Sequence
  Cyclic GFR-binding peptide
DNGRVLLNSLQEVVKDYEDYYVMPLPE

SEQ ID NO: 97859 - protein, 27 aa, Artificial Sequence
  Cyclic GFR-binding peptide
DNGRVLLEYQKYVVKENEDIFLMSIPS

SEQ ID NO: 97860 - protein, 27 aa, Artificial Sequence
  Cyclic GFR-binding peptide
DNGRVLLNSLQEVVKENEDYYVMPLPE

SEQ ID NO: 97861 - protein, 27 aa, Artificial Sequence
  Cyclic GFR-binding peptide
DNGRVLLEYQKYVVKDYEDIFLMSIPS

SEQ ID NO: 97862 - protein, 27 aa, Artificial Sequence
  Cyclic GFR-binding peptide
DNGRVLLQYNKLVVNNASDLYLISIAS

SEQ ID NO: 97863 - protein, 27 aa, Artificial Sequence
  Cyclic GFR-binding peptide
DNGRVLLNSLQEIKPTKGIYYLITLPE

SEQ ID NO: 97864 - protein, 27 aa, Artificial Sequence
  Cyclic GFR-binding peptide
DNGRVLLEYQKYVKPKRGVIFLISIPS

SEQ ID NO: 97865 - protein, 27 aa, Artificial Sequence
  Cyclic GFR-binding peptide
DNGRVLLRYKKLVVNNASDFYLISIAN

SEQ ID NO: 97866 - protein, 27 aa, Artificial Sequence
  Cyclic GFR-binding peptide
DNGRVLLNSLQEIVNSSDDYYLVTLPE

SEQ ID NO: 97867 - protein, 27 aa, Artificial Sequence
  Cyclic GFR-binding peptide
EPLTMLYYDEYDKVVEQLSNDNGRVLL

SEQ ID NO: 97868 - protein, 27 aa, Artificial Sequence
  Cyclic GFR-binding peptide
EPLPIVYYIGKTPKIEQLSNDNGRVLL

SEQ ID NO: 97869 - protein, 27 aa, Artificial Sequence
  Cyclic GFR-binding peptide
EPLTILYYVGRKPKVEQLSNDNGRVLL

SEQ ID NO: 97870 - protein, 27 aa, Artificial Sequence
  Cyclic GFR-binding peptide
EPLPIVYYVGRTPKVEQLSNDNGRVLL

SEQ ID NO: 97871 - protein, 27 aa, Artificial Sequence
  Cyclic GFR-binding peptide
SPISVLFIDDSSNVIYKQYEDNGRVLL

SEQ ID NO: 97872 - protein, 27 aa, Artificial Sequence
  Cyclic GFR-binding peptide
SPISILFIVGRTPKVYKQYEDNGRVLL

SEQ ID NO: 97873 - protein, 27 aa, Artificial Sequence
  Cyclic GFR-binding peptide
EPLTMLYYDENEKVVEQLSNDNGRVLL

SEQ ID NO: 97874 - protein, 27 aa, Artificial Sequence
  Cyclic GFR-binding peptide
EPLTILYYDSANNVVEQLSNDNGRVLL

SEQ ID NO: 97875 - protein, 27 aa, Artificial Sequence
  Cyclic GFR-binding peptide
EPLPIVYYVGRKPKVEQLSNDNGRVLL

SEQ ID NO: 97876 - protein, 27 aa, Artificial Sequence
  Cyclic GFR-binding peptide
EPLPIVYYDSANNVVEQLSNDNGRVLL

SEQ ID NO: 97877 - protein, 27 aa, Artificial Sequence
  Cyclic GFR-binding peptide
EPLTILYYVGRTPKVEQLSNDNGRVLL

SEQ ID NO: 97878 - protein, 27 aa, Artificial Sequence
  Cyclic GFR-binding peptide
SPISILFIIGKTPKIYKQYEDNGRVLL

SEQ ID NO: 97879 - protein, 27 aa, Artificial Sequence
  Cyclic GFR-binding peptide
SPISILFIDSANNVVYKQYEDNGRVLL

SEQ ID NO: 97880 - protein, 27 aa, Artificial Sequence
  Cyclic GFR-binding peptide
EPLPVVYYDDSSNVIEQLSNDNGRVLL

SEQ ID NO: 97881 - protein, 27 aa, Artificial Sequence
  Cyclic GFR-binding peptide
EPLPMVYYDEYDKVVEQLSNDNGRVLL

SEQ ID NO: 97882 - protein, 27 aa, Artificial Sequence
  Cyclic GFR-binding peptide
SPISMLFIDENEKVVYKQYEDNGRVLL

SEQ ID NO: 97883 - protein, 27 aa, Artificial Sequence
  Cyclic GFR-binding peptide
EPLPMVYYDENEKVVEQLSNDNGRVLL

SEQ ID NO: 97884 - protein, 27 aa, Artificial Sequence
  Cyclic GFR-binding peptide
SPISMLFIDEYDKVVYKQYEDNGRVLL

SEQ ID NO: 97885 - protein, 27 aa, Artificial Sequence
  Cyclic GFR-binding peptide
SAISILYLDSANNVVLKNYQDNGRVLL

SEQ ID NO: 97886 - protein, 27 aa, Artificial Sequence
  Cyclic GFR-binding peptide
EPLTILYYIGKTPKIEQLSNDNGRVLL

SEQ ID NO: 97887 - protein, 27 aa, Artificial Sequence
  Cyclic GFR-binding peptide
SPISILFIVGRKPKVYKQYEDNGRVLL

SEQ ID NO: 97888 - protein, 27 aa, Artificial Sequence
  Cyclic GFR-binding peptide
NAISILYFDSANNVVLKKYRDNGRVLL

SEQ ID NO: 97889 - protein, 27 aa, Artificial Sequence
  Cyclic GFR-binding peptide
EPLTVLYYDDSSNVIEQLSNDNGRVLL

SEQ ID NO: 97890 - protein, 29 aa, Artificial Sequence
  Cyclic GFR-binding peptide
DNGRVLLVTAKKLKPKKRVYEIKRVQVPR

SEQ ID NO: 97891 - protein, 29 aa, Artificial Sequence
  Cyclic GFR-binding peptide
DNGRVLLVQVEKLKPKKRVYEVKAVKVSR

SEQ ID NO: 97892 - protein, 29 aa, Artificial Sequence
  Cyclic GFR-binding peptide
DNGRVLLVQVEKFIPKKRVIEVKAVKVSR

SEQ ID NO: 97893 - protein, 29 aa, Artificial Sequence
  Cyclic GFR-binding peptide
DNGRVLLVQVEKHQGQHPKIRVKAMKVSR

SEQ ID NO: 97894 - protein, 29 aa, Artificial Sequence
  Cyclic GFR-binding peptide
DNGRVLLVTAKKHQGQHPKIRIKRMQVPR

SEQ ID NO: 97895 - protein, 29 aa, Artificial Sequence
  Cyclic GFR-binding peptide
DNGRVLLSMEGLLKPKKRVYEMIQVTINS

SEQ ID NO: 97896 - protein, 29 aa, Artificial Sequence
  Cyclic GFR-binding peptide
DNGRVLLSMEGIFIPKKRVIEMIQVTINS

SEQ ID NO: 97897 - protein, 29 aa, Artificial Sequence
  Cyclic GFR-binding peptide
DNGRVLLSMEGLHQGQHPKIRMIQMTINS

SEQ ID NO: 97898 - protein, 29 aa, Artificial Sequence
  Cyclic GFR-binding peptide
DNGRVLLSMEGILKPKKRVYEMIQVTINS

SEQ ID NO: 97899 - protein, 29 aa, Artificial Sequence
  Cyclic GFR-binding peptide
DNGRVLLSMEGLFIPKKRVIEMIQVTINS

SEQ ID NO: 97900 - protein, 29 aa, Artificial Sequence
  Cyclic GFR-binding peptide
DNGRVLLVTAKKFIPKKRVIEIKRVQVPR

SEQ ID NO: 97901 - protein, 29 aa, Artificial Sequence
  Cyclic GFR-binding peptide
DNGRVLLSMEGIHQGQHPKIRMIQMTINS

SEQ ID NO: 97902 - protein, 29 aa, Artificial Sequence
  Cyclic GFR-binding peptide
RPVQVRKIEYVRKKPKLKKATVDNGRVLL

SEQ ID NO: 97903 - protein, 29 aa, Artificial Sequence
  Cyclic GFR-binding peptide
RSVKVAKVEYVRKKPKLKEVQVDNGRVLL

SEQ ID NO: 97904 - protein, 29 aa, Artificial Sequence
  Cyclic GFR-binding peptide
RSVKVAKVEIVRKKPIFKEVQVDNGRVLL

SEQ ID NO: 97905 - protein, 29 aa, Artificial Sequence
  Cyclic GFR-binding peptide
RSVKMAKVRIKPHQGQHKEVQVDNGRVLL

SEQ ID NO: 97906 - protein, 29 aa, Artificial Sequence
  Cyclic GFR-binding peptide
RPVQMRKIRIKPHQGQHKKATVDNGRVLL

SEQ ID NO: 97907 - protein, 29 aa, Artificial Sequence
  Cyclic GFR-binding peptide
SNITVQIMEYVRKKPKLLGEMSDNGRVLL

SEQ ID NO: 97908 - protein, 29 aa, Artificial Sequence
  Cyclic GFR-binding peptide
SNITVQIMEIVRKKPIFIGEMSDNGRVLL

SEQ ID NO: 97909 - protein, 29 aa, Artificial Sequence
  Cyclic GFR-binding peptide
SNITMQIMRIKPHQGQHLGEMSDNGRVLL

SEQ ID NO: 97910 - protein, 29 aa, Artificial Sequence
  Cyclic GFR-binding peptide
SNITVQIMEYVRKKPKLIGEMSDNGRVLL

SEQ ID NO: 97911 - protein, 29 aa, Artificial Sequence
  Cyclic GFR-binding peptide
SNITVQIMEIVRKKPIFLGEMSDNGRVLL

SEQ ID NO: 97912 - protein, 29 aa, Artificial Sequence
  Cyclic GFR-binding peptide
RPVQVRKIEIVRKKPIFKKATVDNGRVLL

SEQ ID NO: 97913 - protein, 29 aa, Artificial Sequence
  Cyclic GFR-binding peptide
SNITMQIMRIKPHQGQHIGEMSDNGRVLL

SEQ ID NO: 97914 - protein, 27 aa, Artificial Sequence
  Cyclic GFR-binding peptide
DNGRVLLEYKFKVKPTRGVLYLISIPE

SEQ ID NO: 97915 - protein, 27 aa, Artificial Sequence
  Cyclic GFR-binding peptide
DNGRVLLEYKFKTPVGMDDLYLVSIPE

SEQ ID NO: 97916 - protein, 27 aa, Artificial Sequence
  Cyclic GFR-binding peptide
DNGRVLLEYQKYVKPKRGVIYLISIPS

SEQ ID NO: 97917 - protein, 27 aa, Artificial Sequence
  Cyclic GFR-binding peptide
DNGRVLLEYQKYVVKDYEDIYLMSIPS

SEQ ID NO: 97918 - protein, 27 aa, Artificial Sequence
  Cyclic GFR-binding peptide
DNGRVLLEYKFKIKPTKGILYLISIPE

SEQ ID NO: 97919 - protein, 27 aa, Artificial Sequence
  Cyclic GFR-binding peptide
DNGRVLLYHYKLYTVVGKDKYLISIPS

SEQ ID NO: 97920 - protein, 27 aa, Artificial Sequence
  Cyclic GFR-binding peptide
DNGRVLLRYKKLYTVVGKDFYLISIAN

SEQ ID NO: 97921 - protein, 27 aa, Artificial Sequence
  Cyclic GFR-binding peptide
DNGRVLLEYQKYVVNNAADIYLISIPS

SEQ ID NO: 97922 - protein, 27 aa, Artificial Sequence
  Cyclic GFR-binding peptide
DNGRVLLEYQKYVKPTRGVIYLISIPS

SEQ ID NO: 97923 - protein, 27 aa, Artificial Sequence
  Cyclic GFR-binding peptide
DNGRVLLEYQKYTPVGMDDIYLVSIPS

SEQ ID NO: 97924 - protein, 27 aa, Artificial Sequence
  Cyclic GFR-binding peptide
DNGRVLLEYKFKVVKDYEDLYLMSIPE

SEQ ID NO: 97925 - protein, 27 aa, Artificial Sequence
  Cyclic GFR-binding peptide
DNGRVLLEYKFKVVNNAADLYLISIPE

SEQ ID NO: 97926 - protein, 27 aa, Artificial Sequence
  Cyclic GFR-binding peptide
DNGRVLLEYQKYVVKENEDIYLMSIPS

SEQ ID NO: 97927 - protein, 27 aa, Artificial Sequence
  Cyclic GFR-binding peptide
DNGRVLLEYQKYIKPTKGIIYLISIPS

SEQ ID NO: 97928 - protein, 27 aa, Artificial Sequence
  Cyclic GFR-binding peptide
DNGRVLLRYKKLVVNNAADFYLISIAN

SEQ ID NO: 97929 - protein, 27 aa, Artificial Sequence
  Cyclic GFR-binding peptide
DNGRVLLYHYKLVVNNAADKYLISIPS

SEQ ID NO: 97930 - protein, 27 aa, Artificial Sequence
  Cyclic GFR-binding peptide
DNGRVLLEYKFKIVNNSSDLYLVSIPE

SEQ ID NO: 97931 - protein, 27 aa, Artificial Sequence
  Cyclic GFR-binding peptide
DNGRVLLEYQKYIVNSSDDIYLVSIPS

SEQ ID NO: 97932 - protein, 27 aa, Artificial Sequence
  Cyclic GFR-binding peptide
DNGRVLLEYKFKIVNSSDDLYLVSIPE

SEQ ID NO: 97933 - protein, 27 aa, Artificial Sequence
  Cyclic GFR-binding peptide
DNGRVLLEYKFKVKPKRGVLYLISIPE

SEQ ID NO: 97934 - protein, 27 aa, Artificial Sequence
  Cyclic GFR-binding peptide
DNGRVLLEYQKYYTVVGKDIYLISIPS

SEQ ID NO: 97935 - protein, 27 aa, Artificial Sequence
  Cyclic GFR-binding peptide
DNGRVLLEYKFKVVKENEDLYLMSIPE

SEQ ID NO: 97936 - protein, 27 aa, Artificial Sequence
  Cyclic GFR-binding peptide
DNGRVLLEYQKYIVNNSSDIYLVSIPS

SEQ ID NO: 97937 - protein, 27 aa, Artificial Sequence
  Cyclic GFR-binding peptide
DNGRVLLEYKFKYTVVGKDLYLISIPE

SEQ ID NO: 97938 - protein, 27 aa, Artificial Sequence
  Cyclic GFR-binding peptide
EPISILYLVGRTPKVKFKYEDNGRVLL

SEQ ID NO: 97939 - protein, 27 aa, Artificial Sequence
  Cyclic GFR-binding peptide
EPISVLYLDDMGVPTKFKYEDNGRVLL

SEQ ID NO: 97940 - protein, 27 aa, Artificial Sequence
  Cyclic GFR-binding peptide
SPISILYIVGRKPKVYKQYEDNGRVLL

SEQ ID NO: 97941 - protein, 27 aa, Artificial Sequence
  Cyclic GFR-binding peptide
SPISMLYIDEYDKVVYKQYEDNGRVLL

SEQ ID NO: 97942 - protein, 27 aa, Artificial Sequence
  Cyclic GFR-binding peptide
EPISILYLIGKTPKIKFKYEDNGRVLL

SEQ ID NO: 97943 - protein, 27 aa, Artificial Sequence
  Cyclic GFR-binding peptide
SPISILYKDKGVVTYLKYHYDNGRVLL

SEQ ID NO: 97944 - protein, 27 aa, Artificial Sequence
  Cyclic GFR-binding peptide
NAISILYFDKGVVTYLKKYRDNGRVLL

SEQ ID NO: 97945 - protein, 27 aa, Artificial Sequence
  Cyclic GFR-binding peptide
SPISILYIDAANNVVYKQYEDNGRVLL

SEQ ID NO: 97946 - protein, 27 aa, Artificial Sequence
  Cyclic GFR-binding peptide
SPISILYIVGRTPKVYKQYEDNGRVLL

SEQ ID NO: 97947 - protein, 27 aa, Artificial Sequence
  Cyclic GFR-binding peptide
SPISVLYIDDMGVPTYKQYEDNGRVLL

SEQ ID NO: 97948 - protein, 27 aa, Artificial Sequence
  Cyclic GFR-binding peptide
EPISMLYLDEYDKVVKFKYEDNGRVLL

SEQ ID NO: 97949 - protein, 27 aa, Artificial Sequence
  Cyclic GFR-binding peptide
EPISILYLDAANNVVKFKYEDNGRVLL

SEQ ID NO: 97950 - protein, 27 aa, Artificial Sequence
  Cyclic GFR-binding peptide
SPISMLYIDENEKVVYKQYEDNGRVLL

SEQ ID NO: 97951 - protein, 27 aa, Artificial Sequence
  Cyclic GFR-binding peptide
SPISILYIIGKTPKIYKQYEDNGRVLL

SEQ ID NO: 97952 - protein, 27 aa, Artificial Sequence
  Cyclic GFR-binding peptide
NAISILYFDAANNVVLKKYRDNGRVLL

SEQ ID NO: 97953 - protein, 27 aa, Artificial Sequence
  Cyclic GFR-binding peptide
SPISILYKDAANNVVLKYHYDNGRVLL

SEQ ID NO: 97954 - protein, 27 aa, Artificial Sequence
  Cyclic GFR-binding peptide
EPISVLYLDSSNNVIKFKYEDNGRVLL

SEQ ID NO: 97955 - protein, 27 aa, Artificial Sequence
  Cyclic GFR-binding peptide
SPISVLYIDDSSNVIYKQYEDNGRVLL

SEQ ID NO: 97956 - protein, 27 aa, Artificial Sequence
  Cyclic GFR-binding peptide
EPISVLYLDDSSNVIKFKYEDNGRVLL

SEQ ID NO: 97957 - protein, 27 aa, Artificial Sequence
  Cyclic GFR-binding peptide
EPISILYLVGRKPKVKFKYEDNGRVLL

SEQ ID NO: 97958 - protein, 27 aa, Artificial Sequence
  Cyclic GFR-binding peptide
SPISILYIDKGVVTYYKQYEDNGRVLL

SEQ ID NO: 97959 - protein, 27 aa, Artificial Sequence
  Cyclic GFR-binding peptide
EPISMLYLDENEKVVKFKYEDNGRVLL

SEQ ID NO: 97960 - protein, 27 aa, Artificial Sequence
  Cyclic GFR-binding peptide
SPISVLYIDSSNNVIYKQYEDNGRVLL

SEQ ID NO: 97961 - protein, 27 aa, Artificial Sequence
  Cyclic GFR-binding peptide
EPISILYLDKGVVTYKFKYEDNGRVLL

SEQ ID NO: 97962 - protein, 27 aa, Artificial Sequence
  Cyclic GFR-binding peptide
DNGRVLLPIKGYIIQQKDNFYLMNIPS

SEQ ID NO: 97963 - protein, 27 aa, Artificial Sequence
  Cyclic GFR-binding peptide
DNGRVLLPIKGYVVKDYEDFYLMNIPS

SEQ ID NO: 97964 - protein, 27 aa, Artificial Sequence
  Cyclic GFR-binding peptide
DNGRVLLPIKGYIVNSSDDFYLVNIPS

SEQ ID NO: 97965 - protein, 27 aa, Artificial Sequence
  Cyclic GFR-binding peptide
DNGRVLLPIKGYVVNNAADFYLINIPS

SEQ ID NO: 97966 - protein, 27 aa, Artificial Sequence
  Cyclic GFR-binding peptide
DNGRVLLPIKGYYTVVGKDFYLINIPS

SEQ ID NO: 97967 - protein, 27 aa, Artificial Sequence
  Cyclic GFR-binding peptide
DNGRVLLPIKGYLLVRGNDFYLMNIPS

SEQ ID NO: 97968 - protein, 27 aa, Artificial Sequence
  Cyclic GFR-binding peptide
DNGRVLLPIKGYVVKENEDFYLMNIPS

SEQ ID NO: 97969 - protein, 27 aa, Artificial Sequence
  Cyclic GFR-binding peptide
DNGRVLLPIKGYVVNNASDFYLINIPS

SEQ ID NO: 97970 - protein, 27 aa, Artificial Sequence
  Cyclic GFR-binding peptide
DNGRVLLPIKGYTPVGMDDFYLVNIPS

SEQ ID NO: 97971 - protein, 27 aa, Artificial Sequence
  Cyclic GFR-binding peptide
DNGRVLLPIKGYIVNNSSDFYLVNIPS

SEQ ID NO: 97972 - protein, 27 aa, Artificial Sequence
  Cyclic GFR-binding peptide
SPINMLYFNDKQQIIYGKIPDNGRVLL

SEQ ID NO: 97973 - protein, 27 aa, Artificial Sequence
  Cyclic GFR-binding peptide
SPINMLYFDEYDKVVYGKIPDNGRVLL

SEQ ID NO: 97974 - protein, 27 aa, Artificial Sequence
  Cyclic GFR-binding peptide
SPINVLYFDDSSNVIYGKIPDNGRVLL

SEQ ID NO: 97975 - protein, 27 aa, Artificial Sequence
  Cyclic GFR-binding peptide
SPINILYFDAANNVVYGKIPDNGRVLL

SEQ ID NO: 97976 - protein, 27 aa, Artificial Sequence
  Cyclic GFR-binding peptide
SPINILYFDKGVVTYYGKIPDNGRVLL

SEQ ID NO: 97977 - protein, 27 aa, Artificial Sequence
  Cyclic GFR-binding peptide
SPINMLYFDNGRVLLYGKIPDNGRVLL

SEQ ID NO: 97978 - protein, 27 aa, Artificial Sequence
  Cyclic GFR-binding peptide
SPINMLYFDENEKVVYGKIPDNGRVLL

SEQ ID NO: 97979 - protein, 27 aa, Artificial Sequence
  Cyclic GFR-binding peptide
SPINILYFDSANNVVYGKIPDNGRVLL

SEQ ID NO: 97980 - protein, 27 aa, Artificial Sequence
  Cyclic GFR-binding peptide
SPINVLYFDDMGVPTYGKIPDNGRVLL

SEQ ID NO: 97981 - protein, 27 aa, Artificial Sequence
  Cyclic GFR-binding peptide
SPINVLYFDSSNNVIYGKIPDNGRVLL

SEQ ID NO: 97982 - protein, 27 aa, Artificial Sequence
  Cyclic GFR-binding peptide
DNGRVLLEYQKYVVNNASDIYLISIPS

SEQ ID NO: 97983 - protein, 27 aa, Artificial Sequence
  Cyclic GFR-binding peptide
DNGRVLLEYQKYIIQQKDNIYLMSIPS

SEQ ID NO: 97984 - protein, 27 aa, Artificial Sequence
  Cyclic GFR-binding peptide
DNGRVLLEYQKYLLVRGNDIYLMSIPS

SEQ ID NO: 97985 - protein, 27 aa, Artificial Sequence
  Cyclic GFR-binding peptide
SPISILYIDSANNVVYKQYEDNGRVLL

SEQ ID NO: 97986 - protein, 27 aa, Artificial Sequence
  Cyclic GFR-binding peptide
SPISMLYINDKQQIIYKQYEDNGRVLL

SEQ ID NO: 97987 - protein, 27 aa, Artificial Sequence
  Cyclic GFR-binding peptide
SPISMLYIDNGRVLLYKQYEDNGRVLL

SEQ ID NO: 97988 - protein, 27 aa, Artificial Sequence
  Cyclic GFR-binding peptide
DNGRVLLPYVKLYTVVGKDFFLISLSS

SEQ ID NO: 97989 - protein, 27 aa, Artificial Sequence
  Cyclic GFR-binding peptide
DNGRVLLPYVKLIKPTKGIFFLISLSS

SEQ ID NO: 97990 - protein, 27 aa, Artificial Sequence
  Cyclic GFR-binding peptide
DNGRVLLPYVKLIIQQKDNFFLMSLSS

SEQ ID NO: 97991 - protein, 27 aa, Artificial Sequence
  Cyclic GFR-binding peptide
DNGRVLLPYVKLIVNSSDDFFLVSLSS

SEQ ID NO: 97992 - protein, 27 aa, Artificial Sequence
  Cyclic GFR-binding peptide
DNGRVLLPYVKLVKPKRGVFFLISLSS

SEQ ID NO: 97993 - protein, 27 aa, Artificial Sequence
  Cyclic GFR-binding peptide
DNGRVLLPYVKLVKPTRGVFFLISLSS

SEQ ID NO: 97994 - protein, 27 aa, Artificial Sequence
  Cyclic GFR-binding peptide
DNGRVLLPYVKLTPVGMDDFFLVSLSS

SEQ ID NO: 97995 - protein, 29 aa, Artificial Sequence
  Cyclic GFR-binding peptide
DNGRVLLPYVKLHQGQHPKIRFFLMSLSS

SEQ ID NO: 97996 - protein, 27 aa, Artificial Sequence
  Cyclic GFR-binding peptide
DNGRVLLPYVKLVVNKNEDFFLISLSS

SEQ ID NO: 97997 - protein, 27 aa, Artificial Sequence
  Cyclic GFR-binding peptide
DNGRVLLPYVKLVVNNASDFFLISLSS

SEQ ID NO: 97998 - protein, 27 aa, Artificial Sequence
  Cyclic GFR-binding peptide
DNGRVLLPYVKLVVKENEDFFLMSLSS

SEQ ID NO: 97999 - protein, 27 aa, Artificial Sequence
  Cyclic GFR-binding peptide
DNGRVLLPYVKLIVNNSSDFFLVSLSS

SEQ ID NO: 98000 - protein, 29 aa, Artificial Sequence
  Cyclic GFR-binding peptide
DNGRVLLPYVKLLKPKKRVYEFFLVSLSS

SEQ ID NO: 98001 - protein, 27 aa, Artificial Sequence
  Cyclic GFR-binding peptide
DNGRVLLPYVKLLLVRGNDFFLMSLSS

SEQ ID NO: 98002 - protein, 27 aa, Artificial Sequence
  Cyclic GFR-binding peptide
DNGRVLLPYVKLVVKDYEDFFLMSLSS

SEQ ID NO: 98003 - protein, 27 aa, Artificial Sequence
  Cyclic GFR-binding peptide
DNGRVLLPYVKLVVNNAADFFLISLSS

SEQ ID NO: 98004 - protein, 27 aa, Artificial Sequence
  Cyclic GFR-binding peptide
SSLSILFFDKGVVTYLKVYPDNGRVLL

SEQ ID NO: 98005 - protein, 27 aa, Artificial Sequence
  Cyclic GFR-binding peptide
SSLSILFFIGKTPKILKVYPDNGRVLL

SEQ ID NO: 98006 - protein, 27 aa, Artificial Sequence
  Cyclic GFR-binding peptide
SSLSMLFFNDKQQIILKVYPDNGRVLL

SEQ ID NO: 98007 - protein, 27 aa, Artificial Sequence
  Cyclic GFR-binding peptide
SSLSVLFFDDSSNVILKVYPDNGRVLL

SEQ ID NO: 98008 - protein, 27 aa, Artificial Sequence
  Cyclic GFR-binding peptide
SSLSILFFVGRKPKVLKVYPDNGRVLL

SEQ ID NO: 98009 - protein, 27 aa, Artificial Sequence
  Cyclic GFR-binding peptide
SSLSILFFVGRTPKVLKVYPDNGRVLL

SEQ ID NO: 98010 - protein, 27 aa, Artificial Sequence
  Cyclic GFR-binding peptide
SSLSVLFFDDMGVPTLKVYPDNGRVLL

SEQ ID NO: 98011 - protein, 29 aa, Artificial Sequence
  Cyclic GFR-binding peptide
SSLSMLFFRIKPHQGQHLKVYPDNGRVLL

SEQ ID NO: 98012 - protein, 27 aa, Artificial Sequence
  Cyclic GFR-binding peptide
SSLSILFFDENKNVVLKVYPDNGRVLL

SEQ ID NO: 98013 - protein, 27 aa, Artificial Sequence
  Cyclic GFR-binding peptide
SSLSILFFDSANNVVLKVYPDNGRVLL

SEQ ID NO: 98014 - protein, 27 aa, Artificial Sequence
  Cyclic GFR-binding peptide
SSLSMLFFDENEKVVLKVYPDNGRVLL

SEQ ID NO: 98015 - protein, 27 aa, Artificial Sequence
  Cyclic GFR-binding peptide
SSLSVLFFDSSNNVILKVYPDNGRVLL

SEQ ID NO: 98016 - protein, 29 aa, Artificial Sequence
  Cyclic GFR-binding peptide
SSLSVLFFEYVRKKPKLLKVYPDNGRVLL

SEQ ID NO: 98017 - protein, 27 aa, Artificial Sequence
  Cyclic GFR-binding peptide
SSLSMLFFDNGRVLLLKVYPDNGRVLL

SEQ ID NO: 98018 - protein, 27 aa, Artificial Sequence
  Cyclic GFR-binding peptide
SSLSMLFFDEYDKVVLKVYPDNGRVLL

SEQ ID NO: 98019 - protein, 27 aa, Artificial Sequence
  Cyclic GFR-binding peptide
SSLSILFFDAANNVVLKVYPDNGRVLL

SEQ ID NO: 98020 - protein, 27 aa, Artificial Sequence
  Cyclic GFR-binding peptide
DNGRVLLSMEGIIVNSSDDMIQVTINS

SEQ ID NO: 98021 - protein, 27 aa, Artificial Sequence
  Cyclic GFR-binding peptide
DNGRVLLVTAKKVVKENEDIKRMQVPR

SEQ ID NO: 98022 - protein, 27 aa, Artificial Sequence
  Cyclic GFR-binding peptide
DNGRVLLSMEGIVVKDYEDMIQMTINS

SEQ ID NO: 98023 - protein, 27 aa, Artificial Sequence
  Cyclic GFR-binding peptide
DNGRVLLVTAKKIKPTKGIIKRIQVPR

SEQ ID NO: 98024 - protein, 27 aa, Artificial Sequence
  Cyclic GFR-binding peptide
DNGRVLLSMEGIVKPTRGVMIQITINS

SEQ ID NO: 98025 - protein, 29 aa, Artificial Sequence
  Cyclic GFR-binding peptide
DNGRVLLNSLQEFIPKKRVIEYYVVPLPE

SEQ ID NO: 98026 - protein, 27 aa, Artificial Sequence
  Cyclic GFR-binding peptide
DNGRVLLVQVEKVKPKRGVVKAIKVSR

SEQ ID NO: 98027 - protein, 27 aa, Artificial Sequence
  Cyclic GFR-binding peptide
DNGRVLLVQVEKVVKENEDVKAMKVSR

SEQ ID NO: 98028 - protein, 27 aa, Artificial Sequence
  Cyclic GFR-binding peptide
DNGRVLLVTAKKIVNSSDDIKRVQVPR

SEQ ID NO: 98029 - protein, 27 aa, Artificial Sequence
  Cyclic GFR-binding peptide
DNGRVLLVQVEKIKPTKGIVKAIKVSR

SEQ ID NO: 98030 - protein, 29 aa, Artificial Sequence
  Cyclic GFR-binding peptide
DNGRVLLNSLQEFIPKKRVIEYYLVTLPE

SEQ ID NO: 98031 - protein, 27 aa, Artificial Sequence
  Cyclic GFR-binding peptide
DNGRVLLVQVEKIVNSSDDVKAVKVSR

SEQ ID NO: 98032 - protein, 27 aa, Artificial Sequence
  Cyclic GFR-binding peptide
DNGRVLLVTAKKVKPKRGVIKRIQVPR

SEQ ID NO: 98033 - protein, 27 aa, Artificial Sequence
  Cyclic GFR-binding peptide
DNGRVLLVQVEKVKPTRGVVKAIKVSR

SEQ ID NO: 98034 - protein, 27 aa, Artificial Sequence
  Cyclic GFR-binding peptide
DNGRVLLVTAKKVKPTRGVIKRIQVPR

SEQ ID NO: 98035 - protein, 29 aa, Artificial Sequence
  Cyclic GFR-binding peptide
DNGRVLLNSLQELKPKKRVYEYYLVTLPE

SEQ ID NO: 98036 - protein, 27 aa, Artificial Sequence
  Cyclic GFR-binding peptide
DNGRVLLSMEGIVKPKRGVMIQITINS

SEQ ID NO: 98037 - protein, 27 aa, Artificial Sequence
  Cyclic GFR-binding peptide
DNGRVLLSMEGIVVKENEDMIQMTINS

SEQ ID NO: 98038 - protein, 27 aa, Artificial Sequence
  Cyclic GFR-binding peptide
DNGRVLLSMEGIIKPTKGIMIQITINS

SEQ ID NO: 98039 - protein, 29 aa, Artificial Sequence
  Cyclic GFR-binding peptide
DNGRVLLNSLQEHQGQHPKIRYYLMTLPE

SEQ ID NO: 98040 - protein, 27 aa, Artificial Sequence
  Cyclic GFR-binding peptide
DNGRVLLVTAKKVVKDYEDIKRMQVPR

SEQ ID NO: 98041 - protein, 29 aa, Artificial Sequence
  Cyclic GFR-binding peptide
DNGRVLLNSLQEHQGQHPKIRYYVMPLPE

SEQ ID NO: 98042 - protein, 29 aa, Artificial Sequence
  Cyclic GFR-binding peptide
DNGRVLLNSLQELKPKKRVYEYYVVPLPE

SEQ ID NO: 98043 - protein, 27 aa, Artificial Sequence
  Cyclic GFR-binding peptide
DNGRVLLVQVEKVVKDYEDVKAMKVSR

SEQ ID NO: 98044 - protein, 27 aa, Artificial Sequence
  Cyclic GFR-binding peptide
SNITVQIMDDSSNVIIGEMSDNGRVLL

SEQ ID NO: 98045 - protein, 27 aa, Artificial Sequence
  Cyclic GFR-binding peptide
RPVQMRKIDENEKVVKKATVDNGRVLL

SEQ ID NO: 98046 - protein, 27 aa, Artificial Sequence
  Cyclic GFR-binding peptide
SNITMQIMDEYDKVVIGEMSDNGRVLL

SEQ ID NO: 98047 - protein, 27 aa, Artificial Sequence
  Cyclic GFR-binding peptide
RPVQIRKIIGKTPKIKKATVDNGRVLL

SEQ ID NO: 98048 - protein, 27 aa, Artificial Sequence
  Cyclic GFR-binding peptide
SNITIQIMVGRTPKVIGEMSDNGRVLL

SEQ ID NO: 98049 - protein, 29 aa, Artificial Sequence
  Cyclic GFR-binding peptide
EPLPVVYYEIVRKKPIFEQLSNDNGRVLL

SEQ ID NO: 98050 - protein, 27 aa, Artificial Sequence
  Cyclic GFR-binding peptide
RSVKIAKVVGRKPKVKEVQVDNGRVLL

SEQ ID NO: 98051 - protein, 27 aa, Artificial Sequence
  Cyclic GFR-binding peptide
RSVKMAKVDENEKVVKEVQVDNGRVLL

SEQ ID NO: 98052 - protein, 27 aa, Artificial Sequence
  Cyclic GFR-binding peptide
RPVQVRKIDDSSNVIKKATVDNGRVLL

SEQ ID NO: 98053 - protein, 27 aa, Artificial Sequence
  Cyclic GFR-binding peptide
RSVKIAKVIGKTPKIKEVQVDNGRVLL

SEQ ID NO: 98054 - protein, 29 aa, Artificial Sequence
  Cyclic GFR-binding peptide
EPLTVLYYEIVRKKPIFEQLSNDNGRVLL

SEQ ID NO: 98055 - protein, 27 aa, Artificial Sequence
  Cyclic GFR-binding peptide
RSVKVAKVDDSSNVIKEVQVDNGRVLL

SEQ ID NO: 98056 - protein, 27 aa, Artificial Sequence
  Cyclic GFR-binding peptide
RPVQIRKIVGRKPKVKKATVDNGRVLL

SEQ ID NO: 98057 - protein, 27 aa, Artificial Sequence
  Cyclic GFR-binding peptide
RSVKIAKVVGRTPKVKEVQVDNGRVLL

SEQ ID NO: 98058 - protein, 27 aa, Artificial Sequence
  Cyclic GFR-binding peptide
RPVQIRKIVGRTPKVKKATVDNGRVLL

SEQ ID NO: 98059 - protein, 29 aa, Artificial Sequence
  Cyclic GFR-binding peptide
EPLTVLYYEYVRKKPKLEQLSNDNGRVLL

SEQ ID NO: 98060 - protein, 27 aa, Artificial Sequence
  Cyclic GFR-binding peptide
SNITIQIMVGRKPKVIGEMSDNGRVLL

SEQ ID NO: 98061 - protein, 27 aa, Artificial Sequence
  Cyclic GFR-binding peptide
SNITMQIMDENEKVVIGEMSDNGRVLL

SEQ ID NO: 98062 - protein, 27 aa, Artificial Sequence
  Cyclic GFR-binding peptide
SNITIQIMIGKTPKIIGEMSDNGRVLL

SEQ ID NO: 98063 - protein, 29 aa, Artificial Sequence
  Cyclic GFR-binding peptide
EPLTMLYYRIKPHQGQHEQLSNDNGRVLL

SEQ ID NO: 98064 - protein, 27 aa, Artificial Sequence
  Cyclic GFR-binding peptide
RPVQMRKIDEYDKVVKKATVDNGRVLL

SEQ ID NO: 98065 - protein, 29 aa, Artificial Sequence
  Cyclic GFR-binding peptide
EPLPMVYYRIKPHQGQHEQLSNDNGRVLL

SEQ ID NO: 98066 - protein, 29 aa, Artificial Sequence
  Cyclic GFR-binding peptide
EPLPVVYYEYVRKKPKLEQLSNDNGRVLL

SEQ ID NO: 98067 - protein, 27 aa, Artificial Sequence
  Cyclic GFR-binding peptide
RSVKMAKVDEYDKVVKEVQVDNGRVLL

SEQ ID NO: 98068 - protein, 27 aa, Artificial Sequence
  Cyclic GFR-binding peptide
DNGRVLLRYKKLIIQQKDNFYLMSIAN

SEQ ID NO: 98069 - protein, 27 aa, Artificial Sequence
  Cyclic GFR-binding peptide
DNGRVLLRYKKLLLVRGNDFYLMSIAN

SEQ ID NO: 98070 - protein, 27 aa, Artificial Sequence
  Cyclic GFR-binding peptide
NAISMLYFNDKQQIILKKYRDNGRVLL

SEQ ID NO: 98071 - protein, 27 aa, Artificial Sequence
  Cyclic GFR-binding peptide
NAISMLYFDNGRVLLLKKYRDNGRVLL

SEQ ID NO: 98072 - protein, 27 aa, Artificial Sequence
  Cyclic GFR-binding peptide
DNGRVLLEYKFKVVNKNEDLYLISIPE

SEQ ID NO: 98073 - protein, 27 aa, Artificial Sequence
  Cyclic GFR-binding peptide
DNGRVLLPIKGYVKPTRGVFYLINIPS

SEQ ID NO: 98074 - protein, 27 aa, Artificial Sequence
  Cyclic GFR-binding peptide
DNGRVLLEYKFKLLVRGNDLYLMSIPE

SEQ ID NO: 98075 - protein, 27 aa, Artificial Sequence
  Cyclic GFR-binding peptide
DNGRVLLYHYKLVVNKNEDKYLISIPS

SEQ ID NO: 98076 - protein, 27 aa, Artificial Sequence
  Cyclic GFR-binding peptide
DNGRVLLRHKRLLLVRGNDYYLMSTAS

SEQ ID NO: 98077 - protein, 27 aa, Artificial Sequence
  Cyclic GFR-binding peptide
DNGRVLLYHYKLLLVRGNDKYLMSIPS

SEQ ID NO: 98078 - protein, 27 aa, Artificial Sequence
  Cyclic GFR-binding peptide
DNGRVLLRHKRLVVNKNEDYYLISTAS

SEQ ID NO: 98079 - protein, 27 aa, Artificial Sequence
  Cyclic GFR-binding peptide
DNGRVLLRYKKLVVNKNEDFYLISIAN

SEQ ID NO: 98080 - protein, 27 aa, Artificial Sequence
  Cyclic GFR-binding peptide
DNGRVLLPIKGYVVNKNEDFYLINIPS

SEQ ID NO: 98081 - protein, 27 aa, Artificial Sequence
  Cyclic GFR-binding peptide
DNGRVLLPIKGYIKPTKGIFYLINIPS

SEQ ID NO: 98082 - protein, 27 aa, Artificial Sequence
  Cyclic GFR-binding peptide
DNGRVLLRHKRLYTVVGKDYYLISTAS

SEQ ID NO: 98083 - protein, 27 aa, Artificial Sequence
  Cyclic GFR-binding peptide
DNGRVLLEYKFKVVNNASDLYLISIPE

SEQ ID NO: 98084 - protein, 27 aa, Artificial Sequence
  Cyclic GFR-binding peptide
DNGRVLLRHKRLIIQQKDNYYLMSTAS

SEQ ID NO: 98085 - protein, 27 aa, Artificial Sequence
  Cyclic GFR-binding peptide
DNGRVLLEYKFKIIQQKDNLYLMSIPE

SEQ ID NO: 98086 - protein, 27 aa, Artificial Sequence
  Cyclic GFR-binding peptide
DNGRVLLPIKGYVKPKRGVFYLINIPS

SEQ ID NO: 98087 - protein, 27 aa, Artificial Sequence
  Cyclic GFR-binding peptide
DNGRVLLRHKRLVVNNASDYYLISTAS

SEQ ID NO: 98088 - protein, 27 aa, Artificial Sequence
  Cyclic GFR-binding peptide
DNGRVLLYHYKLVVNNASDKYLISIPS

SEQ ID NO: 98089 - protein, 27 aa, Artificial Sequence
  Cyclic GFR-binding peptide
DNGRVLLYHYKLIIQQKDNKYLMSIPS

SEQ ID NO: 98090 - protein, 27 aa, Artificial Sequence
  Cyclic GFR-binding peptide
DNGRVLLRHKRLVVNNAADYYLISTAS

SEQ ID NO: 98091 - protein, 27 aa, Artificial Sequence
  Cyclic GFR-binding peptide
EPISILYLDENKNVVKFKYEDNGRVLL

SEQ ID NO: 98092 - protein, 27 aa, Artificial Sequence
  Cyclic GFR-binding peptide
SPINILYFVGRTPKVYGKIPDNGRVLL

SEQ ID NO: 98093 - protein, 27 aa, Artificial Sequence
  Cyclic GFR-binding peptide
EPISMLYLDNGRVLLKFKYEDNGRVLL

SEQ ID NO: 98094 - protein, 27 aa, Artificial Sequence
  Cyclic GFR-binding peptide
SPISILYKDENKNVVLKYHYDNGRVLL

SEQ ID NO: 98095 - protein, 27 aa, Artificial Sequence
  Cyclic GFR-binding peptide
SATSMLYYDNGRVLLLRKHRDNGRVLL

SEQ ID NO: 98096 - protein, 27 aa, Artificial Sequence
  Cyclic GFR-binding peptide
SPISMLYKDNGRVLLLKYHYDNGRVLL

SEQ ID NO: 98097 - protein, 27 aa, Artificial Sequence
  Cyclic GFR-binding peptide
SATSILYYDENKNVVLRKHRDNGRVLL

SEQ ID NO: 98098 - protein, 27 aa, Artificial Sequence
  Cyclic GFR-binding peptide
NAISILYFDENKNVVLKKYRDNGRVLL

SEQ ID NO: 98099 - protein, 27 aa, Artificial Sequence
  Cyclic GFR-binding peptide
SPINILYFDENKNVVYGKIPDNGRVLL

SEQ ID NO: 98100 - protein, 27 aa, Artificial Sequence
  Cyclic GFR-binding peptide
SPINILYFIGKTPKIYGKIPDNGRVLL

SEQ ID NO: 98101 - protein, 27 aa, Artificial Sequence
  Cyclic GFR-binding peptide
SATSILYYDKGVVTYLRKHRDNGRVLL

SEQ ID NO: 98102 - protein, 27 aa, Artificial Sequence
  Cyclic GFR-binding peptide
EPISILYLDSANNVVKFKYEDNGRVLL

SEQ ID NO: 98103 - protein, 27 aa, Artificial Sequence
  Cyclic GFR-binding peptide
SATSMLYYNDKQQIILRKHRDNGRVLL

SEQ ID NO: 98104 - protein, 27 aa, Artificial Sequence
  Cyclic GFR-binding peptide
EPISMLYLNDKQQIIKFKYEDNGRVLL

SEQ ID NO: 98105 - protein, 27 aa, Artificial Sequence
  Cyclic GFR-binding peptide
SPINILYFVGRKPKVYGKIPDNGRVLL

SEQ ID NO: 98106 - protein, 27 aa, Artificial Sequence
  Cyclic GFR-binding peptide
SATSILYYDSANNVVLRKHRDNGRVLL

SEQ ID NO: 98107 - protein, 27 aa, Artificial Sequence
  Cyclic GFR-binding peptide
SPISILYKDSANNVVLKYHYDNGRVLL

SEQ ID NO: 98108 - protein, 27 aa, Artificial Sequence
  Cyclic GFR-binding peptide
SPISMLYKNDKQQIILKYHYDNGRVLL

SEQ ID NO: 98109 - protein, 27 aa, Artificial Sequence
  Cyclic GFR-binding peptide
SATSILYYDAANNVVLRKHRDNGRVLL

SEQ ID NO: 98110 - protein, 27 aa, Artificial Sequence
  Cyclic GFR-binding peptide
DNGRVLLSMEGIIIQQKDNMIQMTINS

SEQ ID NO: 98111 - protein, 27 aa, Artificial Sequence
  Cyclic GFR-binding peptide
DNGRVLLSMEGLVKPKRGVMIQITINS

SEQ ID NO: 98112 - protein, 27 aa, Artificial Sequence
  Cyclic GFR-binding peptide
DNGRVLLSMEGLVVNNASDMIQITINS

SEQ ID NO: 98113 - protein, 27 aa, Artificial Sequence
  Cyclic GFR-binding peptide
DNGRVLLSMEGILLVRGNDMIQMTINS

SEQ ID NO: 98114 - protein, 27 aa, Artificial Sequence
  Cyclic GFR-binding peptide
DNGRVLLSMEGLIKPTKGIMIQITINS

SEQ ID NO: 98115 - protein, 27 aa, Artificial Sequence
  Cyclic GFR-binding peptide
DNGRVLLSMEGLIVNSSDDMIQVTINS

SEQ ID NO: 98116 - protein, 27 aa, Artificial Sequence
  Cyclic GFR-binding peptide
DNGRVLLSMEGIVVNNASDMIQITINS

SEQ ID NO: 98117 - protein, 27 aa, Artificial Sequence
  Cyclic GFR-binding peptide
DNGRVLLSMEGLVVNNAADMIQITINS

SEQ ID NO: 98118 - protein, 27 aa, Artificial Sequence
  Cyclic GFR-binding peptide
DNGRVLLSMEGLLLVRGNDMIQMTINS

SEQ ID NO: 98119 - protein, 27 aa, Artificial Sequence
  Cyclic GFR-binding peptide
DNGRVLLSMEGLIIQQKDNMIQMTINS

SEQ ID NO: 98120 - protein, 27 aa, Artificial Sequence
  Cyclic GFR-binding peptide
DNGRVLLSMEGIVVNNAADMIQITINS

SEQ ID NO: 98121 - protein, 27 aa, Artificial Sequence
  Cyclic GFR-binding peptide
DNGRVLLSMEGLVKPTRGVMIQITINS

SEQ ID NO: 98122 - protein, 27 aa, Artificial Sequence
  Cyclic GFR-binding peptide
SNITMQIMNDKQQIIIGEMSDNGRVLL

SEQ ID NO: 98123 - protein, 27 aa, Artificial Sequence
  Cyclic GFR-binding peptide
SNITIQIMVGRKPKVLGEMSDNGRVLL

SEQ ID NO: 98124 - protein, 27 aa, Artificial Sequence
  Cyclic GFR-binding peptide
SNITIQIMDSANNVVLGEMSDNGRVLL

SEQ ID NO: 98125 - protein, 27 aa, Artificial Sequence
  Cyclic GFR-binding peptide
SNITMQIMDNGRVLLIGEMSDNGRVLL

SEQ ID NO: 98126 - protein, 27 aa, Artificial Sequence
  Cyclic GFR-binding peptide
SNITIQIMIGKTPKILGEMSDNGRVLL

SEQ ID NO: 98127 - protein, 27 aa, Artificial Sequence
  Cyclic GFR-binding peptide
SNITVQIMDDSSNVILGEMSDNGRVLL

SEQ ID NO: 98128 - protein, 27 aa, Artificial Sequence
  Cyclic GFR-binding peptide
SNITIQIMDSANNVVIGEMSDNGRVLL

SEQ ID NO: 98129 - protein, 27 aa, Artificial Sequence
  Cyclic GFR-binding peptide
SNITIQIMDAANNVVLGEMSDNGRVLL

SEQ ID NO: 98130 - protein, 27 aa, Artificial Sequence
  Cyclic GFR-binding peptide
SNITMQIMDNGRVLLLGEMSDNGRVLL

SEQ ID NO: 98131 - protein, 27 aa, Artificial Sequence
  Cyclic GFR-binding peptide
SNITMQIMNDKQQIILGEMSDNGRVLL

SEQ ID NO: 98132 - protein, 27 aa, Artificial Sequence
  Cyclic GFR-binding peptide
SNITIQIMDAANNVVIGEMSDNGRVLL

SEQ ID NO: 98133 - protein, 27 aa, Artificial Sequence
  Cyclic GFR-binding peptide
SNITIQIMVGRTPKVLGEMSDNGRVLL

SEQ ID NO: 98134 - protein, 27 aa, Artificial Sequence
  Cyclic GFR-binding peptide
DNGRVLLQYNKLVVNKNEDLYLISIAS

SEQ ID NO: 98135 - protein, 27 aa, Artificial Sequence
  Cyclic GFR-binding peptide
DNGRVLLQYNKLVVNNAADLYLISIAS

SEQ ID NO: 98136 - protein, 27 aa, Artificial Sequence
  Cyclic GFR-binding peptide
DNGRVLLQYNKLIIQQKDNLYLMSIAS

SEQ ID NO: 98137 - protein, 27 aa, Artificial Sequence
  Cyclic GFR-binding peptide
DNGRVLLQYNKLLLVRGNDLYLMSIAS

SEQ ID NO: 98138 - protein, 27 aa, Artificial Sequence
  Cyclic GFR-binding peptide
DNGRVLLQYNKLYTVVGKDLYLISIAS

SEQ ID NO: 98139 - protein, 27 aa, Artificial Sequence
  Cyclic GFR-binding peptide
SAISILYLDENKNVVLKNYQDNGRVLL

SEQ ID NO: 98140 - protein, 27 aa, Artificial Sequence
  Cyclic GFR-binding peptide
SAISILYLDAANNVVLKNYQDNGRVLL

SEQ ID NO: 98141 - protein, 27 aa, Artificial Sequence
  Cyclic GFR-binding peptide
SAISMLYLNDKQQIILKNYQDNGRVLL

SEQ ID NO: 98142 - protein, 27 aa, Artificial Sequence
  Cyclic GFR-binding peptide
SAISMLYLDNGRVLLLKNYQDNGRVLL

SEQ ID NO: 98143 - protein, 27 aa, Artificial Sequence
  Cyclic GFR-binding peptide
SAISILYLDKGVVTYLKNYQDNGRVLL

SEQ ID NO: 98144 - protein, 27 aa, Artificial Sequence
  Cyclic GFR-binding peptide
VGRKPKVRYKKLIKPTKGIFYLISIAN

SEQ ID NO: 98145 - protein, 29 aa, Artificial Sequence
  Cyclic GFR-binding peptide
VGRKPKVRHKRLFIPKKRVIEYYLVSTAS

SEQ ID NO: 98146 - protein, 27 aa, Artificial Sequence
  Cyclic GFR-binding peptide
VGRKPKVYHYKLVVKDYEDKYLMSIPS

SEQ ID NO: 98147 - protein, 27 aa, Artificial Sequence
  Cyclic GFR-binding peptide
VGRKPKVQYNKLIVNNSSDLYLVSIAS

SEQ ID NO: 98148 - protein, 27 aa, Artificial Sequence
  Cyclic GFR-binding peptide
VGRKPKVRYKKLVVKDYEDFYLMSIAN

SEQ ID NO: 98149 - protein, 27 aa, Artificial Sequence
  Cyclic GFR-binding peptide
VGRKPKVRYKKLVKPTRGVFYLISIAN

SEQ ID NO: 98150 - protein, 27 aa, Artificial Sequence
  Cyclic GFR-binding peptide
VGRKPKVRHKRLVVKENEDYYLMSTAS

SEQ ID NO: 98151 - protein, 27 aa, Artificial Sequence
  Cyclic GFR-binding peptide
VGRKPKVYHYKLIKPTKGIKYLISIPS

SEQ ID NO: 98152 - protein, 29 aa, Artificial Sequence
  Cyclic GFR-binding peptide
VGRKPKVRYKKLFIPKKRVIEFYLVSIAN

SEQ ID NO: 98153 - protein, 27 aa, Artificial Sequence
  Cyclic GFR-binding peptide
VGRKPKVYHYKLVVKENEDKYLMSIPS

SEQ ID NO: 98154 - protein, 27 aa, Artificial Sequence
  Cyclic GFR-binding peptide
VGRKPKVRHKRLVKPKRGVYYLISTAS

SEQ ID NO: 98155 - protein, 27 aa, Artificial Sequence
  Cyclic GFR-binding peptide
VGRKPKVYHYKLVKPKRGVKYLISIPS

SEQ ID NO: 98156 - protein, 29 aa, Artificial Sequence
  Cyclic GFR-binding peptide
VGRKPKVQYNKLFIPKKRVIELYLVSIAS

SEQ ID NO: 98157 - protein, 27 aa, Artificial Sequence
  Cyclic GFR-binding peptide
VGRKPKVQYNKLVKPTRGVLYLISIAS

SEQ ID NO: 98158 - protein, 27 aa, Artificial Sequence
  Cyclic GFR-binding peptide
VGRKPKVRYKKLVVKENEDFYLMSIAN

SEQ ID NO: 98159 - protein, 27 aa, Artificial Sequence
  Cyclic GFR-binding peptide
VGRKPKVQYNKLTPVGMDDLYLVSIAS

SEQ ID NO: 98160 - protein, 27 aa, Artificial Sequence
  Cyclic GFR-binding peptide
VGRKPKVRYKKLTPVGMDDFYLVSIAN

SEQ ID NO: 98161 - protein, 27 aa, Artificial Sequence
  Cyclic GFR-binding peptide
VGRKPKVRYKKLVKPKRGVFYLISIAN

SEQ ID NO: 98162 - protein, 27 aa, Artificial Sequence
  Cyclic GFR-binding peptide
VGRKPKVQYNKLVVKENEDLYLMSIAS

SEQ ID NO: 98163 - protein, 27 aa, Artificial Sequence
  Cyclic GFR-binding peptide
VGRKPKVYHYKLIVNSSDDKYLVSIPS

SEQ ID NO: 98164 - protein, 27 aa, Artificial Sequence
  Cyclic GFR-binding peptide
VGRKPKVQYNKLVKPKRGVLYLISIAS

SEQ ID NO: 98165 - protein, 27 aa, Artificial Sequence
  Cyclic GFR-binding peptide
VGRKPKVRYKKLIVNNSSDFYLVSIAN

SEQ ID NO: 98166 - protein, 27 aa, Artificial Sequence
  Cyclic GFR-binding peptide
VGRKPKVRYKKLIVNSSDDFYLVSIAN

SEQ ID NO: 98167 - protein, 27 aa, Artificial Sequence
  Cyclic GFR-binding peptide
VGRKPKVRHKRLVKPTRGVYYLISTAS

SEQ ID NO: 98168 - protein, 29 aa, Artificial Sequence
  Cyclic GFR-binding peptide
VGRKPKVYHYKLFIPKKRVIEKYLVSIPS

SEQ ID NO: 98169 - protein, 27 aa, Artificial Sequence
  Cyclic GFR-binding peptide
VGRKPKVRHKRLIKPTKGIYYLISTAS

SEQ ID NO: 98170 - protein, 27 aa, Artificial Sequence
  Cyclic GFR-binding peptide
VGRKPKVRHKRLTPVGMDDYYLVSTAS

SEQ ID NO: 98171 - protein, 27 aa, Artificial Sequence
  Cyclic GFR-binding peptide
VGRKPKVYHYKLTPVGMDDKYLVSIPS

SEQ ID NO: 98172 - protein, 27 aa, Artificial Sequence
  Cyclic GFR-binding peptide
VGRKPKVYHYKLIVNNSSDKYLVSIPS

SEQ ID NO: 98173 - protein, 27 aa, Artificial Sequence
  Cyclic GFR-binding peptide
VGRKPKVRHKRLIVNNSSDYYLVSTAS

SEQ ID NO: 98174 - protein, 27 aa, Artificial Sequence
  Cyclic GFR-binding peptide
VGRKPKVYHYKLVKPTRGVKYLISIPS

SEQ ID NO: 98175 - protein, 27 aa, Artificial Sequence
  Cyclic GFR-binding peptide
VGRKPKVRHKRLIVNSSDDYYLVSTAS

SEQ ID NO: 98176 - protein, 27 aa, Artificial Sequence
  Cyclic GFR-binding peptide
VGRKPKVRHKRLVVKDYEDYYLMSTAS

SEQ ID NO: 98177 - protein, 27 aa, Artificial Sequence
  Cyclic GFR-binding peptide
VGRKPKVQYNKLIKPTKGILYLISIAS

SEQ ID NO: 98178 - protein, 27 aa, Artificial Sequence
  Cyclic GFR-binding peptide
VGRKPKVQYNKLVVKDYEDLYLMSIAS

SEQ ID NO: 98179 - protein, 27 aa, Artificial Sequence
  Cyclic GFR-binding peptide
VGRKPKVQYNKLIVNSSDDLYLVSIAS

SEQ ID NO: 98180 - protein, 27 aa, Artificial Sequence
  Cyclic GFR-binding peptide
NAISILYFIGKTPKILKKYRVGRKPKV

SEQ ID NO: 98181 - protein, 29 aa, Artificial Sequence
  Cyclic GFR-binding peptide
SATSVLYYEIVRKKPIFLRKHRVGRKPKV

SEQ ID NO: 98182 - protein, 27 aa, Artificial Sequence
  Cyclic GFR-binding peptide
SPISMLYKDEYDKVVLKYHYVGRKPKV

SEQ ID NO: 98183 - protein, 27 aa, Artificial Sequence
  Cyclic GFR-binding peptide
SAISVLYLDSSNNVILKNYQVGRKPKV

SEQ ID NO: 98184 - protein, 27 aa, Artificial Sequence
  Cyclic GFR-binding peptide
NAISMLYFDEYDKVVLKKYRVGRKPKV

SEQ ID NO: 98185 - protein, 27 aa, Artificial Sequence
  Cyclic GFR-binding peptide
NAISILYFVGRTPKVLKKYRVGRKPKV

SEQ ID NO: 98186 - protein, 27 aa, Artificial Sequence
  Cyclic GFR-binding peptide
SATSMLYYDENEKVVLRKHRVGRKPKV

SEQ ID NO: 98187 - protein, 27 aa, Artificial Sequence
  Cyclic GFR-binding peptide
SPISILYKIGKTPKILKYHYVGRKPKV

SEQ ID NO: 98188 - protein, 29 aa, Artificial Sequence
  Cyclic GFR-binding peptide
NAISVLYFEIVRKKPIFLKKYRVGRKPKV

SEQ ID NO: 98189 - protein, 27 aa, Artificial Sequence
  Cyclic GFR-binding peptide
SPISMLYKDENEKVVLKYHYVGRKPKV

SEQ ID NO: 98190 - protein, 27 aa, Artificial Sequence
  Cyclic GFR-binding peptide
SATSILYYVGRKPKVLRKHRVGRKPKV

SEQ ID NO: 98191 - protein, 27 aa, Artificial Sequence
  Cyclic GFR-binding peptide
SPISILYKVGRKPKVLKYHYVGRKPKV

SEQ ID NO: 98192 - protein, 29 aa, Artificial Sequence
  Cyclic GFR-binding peptide
SAISVLYLEIVRKKPIFLKNYQVGRKPKV

SEQ ID NO: 98193 - protein, 27 aa, Artificial Sequence
  Cyclic GFR-binding peptide
SAISILYLVGRTPKVLKNYQVGRKPKV

SEQ ID NO: 98194 - protein, 27 aa, Artificial Sequence
  Cyclic GFR-binding peptide
NAISMLYFDENEKVVLKKYRVGRKPKV

SEQ ID NO: 98195 - protein, 27 aa, Artificial Sequence
  Cyclic GFR-binding peptide
SAISVLYLDDMGVPTLKNYQVGRKPKV

SEQ ID NO: 98196 - protein, 27 aa, Artificial Sequence
  Cyclic GFR-binding peptide
NAISVLYFDDMGVPTLKKYRVGRKPKV

SEQ ID NO: 98197 - protein, 27 aa, Artificial Sequence
  Cyclic GFR-binding peptide
NAISILYFVGRKPKVLKKYRVGRKPKV

SEQ ID NO: 98198 - protein, 27 aa, Artificial Sequence
  Cyclic GFR-binding peptide
SAISMLYLDENEKVVLKNYQVGRKPKV

SEQ ID NO: 98199 - protein, 27 aa, Artificial Sequence
  Cyclic GFR-binding peptide
SPISVLYKDDSSNVILKYHYVGRKPKV

SEQ ID NO: 98200 - protein, 27 aa, Artificial Sequence
  Cyclic GFR-binding peptide
NAISVLYFDSSNNVILKKYRVGRKPKV

SEQ ID NO: 98201 - protein, 27 aa, Artificial Sequence
  Cyclic GFR-binding peptide
NAISVLYFDDSSNVILKKYRVGRKPKV

SEQ ID NO: 98202 - protein, 27 aa, Artificial Sequence
  Cyclic GFR-binding peptide
SATSILYYVGRTPKVLRKHRVGRKPKV

SEQ ID NO: 98203 - protein, 29 aa, Artificial Sequence
  Cyclic GFR-binding peptide
SPISVLYKEIVRKKPIFLKYHYVGRKPKV

SEQ ID NO: 98204 - protein, 27 aa, Artificial Sequence
  Cyclic GFR-binding peptide
SATSILYYIGKTPKILRKHRVGRKPKV

SEQ ID NO: 98205 - protein, 27 aa, Artificial Sequence
  Cyclic GFR-binding peptide
SATSVLYYDDMGVPTLRKHRVGRKPKV

SEQ ID NO: 98206 - protein, 27 aa, Artificial Sequence
  Cyclic GFR-binding peptide
SPISVLYKDDMGVPTLKYHYVGRKPKV

SEQ ID NO: 98207 - protein, 27 aa, Artificial Sequence
  Cyclic GFR-binding peptide
SPISVLYKDSSNNVILKYHYVGRKPKV

SEQ ID NO: 98208 - protein, 27 aa, Artificial Sequence
  Cyclic GFR-binding peptide
SATSVLYYDSSNNVILRKHRVGRKPKV

SEQ ID NO: 98209 - protein, 27 aa, Artificial Sequence
  Cyclic GFR-binding peptide
SPISILYKVGRTPKVLKYHYVGRKPKV

SEQ ID NO: 98210 - protein, 27 aa, Artificial Sequence
  Cyclic GFR-binding peptide
SATSVLYYDDSSNVILRKHRVGRKPKV

SEQ ID NO: 98211 - protein, 27 aa, Artificial Sequence
  Cyclic GFR-binding peptide
SATSMLYYDEYDKVVLRKHRVGRKPKV

SEQ ID NO: 98212 - protein, 27 aa, Artificial Sequence
  Cyclic GFR-binding peptide
SAISILYLIGKTPKILKNYQVGRKPKV

SEQ ID NO: 98213 - protein, 27 aa, Artificial Sequence
  Cyclic GFR-binding peptide
SAISMLYLDEYDKVVLKNYQVGRKPKV

SEQ ID NO: 98214 - protein, 27 aa, Artificial Sequence
  Cyclic GFR-binding peptide
SAISVLYLDDSSNVILKNYQVGRKPKV

SEQ ID NO: 98215 - protein, 27 aa, Artificial Sequence
  Cyclic GFR-binding peptide
VGRKPKVNSLQEVVKDYEDYYLMTLPE

SEQ ID NO: 98216 - protein, 27 aa, Artificial Sequence
  Cyclic GFR-binding peptide
VGRKPKVNSLQEIKPTKGIYYVIPLPE

SEQ ID NO: 98217 - protein, 27 aa, Artificial Sequence
  Cyclic GFR-binding peptide
VGRKPKVNSLQEVKPKRGVYYLITLPE

SEQ ID NO: 98218 - protein, 27 aa, Artificial Sequence
  Cyclic GFR-binding peptide
VGRKPKVNSLQEVKPTRGVYYVIPLPE

SEQ ID NO: 98219 - protein, 27 aa, Artificial Sequence
  Cyclic GFR-binding peptide
VGRKPKVEYQKYIVNSSDDIFLVSIPS

SEQ ID NO: 98220 - protein, 27 aa, Artificial Sequence
  Cyclic GFR-binding peptide
VGRKPKVEYQKYVKPTRGVIFLISIPS

SEQ ID NO: 98221 - protein, 27 aa, Artificial Sequence
  Cyclic GFR-binding peptide
VGRKPKVNSLQEVVKENEDYYLMTLPE

SEQ ID NO: 98222 - protein, 27 aa, Artificial Sequence
  Cyclic GFR-binding peptide
VGRKPKVNSLQEVVNNASDYYLITLPE

SEQ ID NO: 98223 - protein, 27 aa, Artificial Sequence
  Cyclic GFR-binding peptide
VGRKPKVNSLQEVKPKRGVYYVIPLPE

SEQ ID NO: 98224 - protein, 27 aa, Artificial Sequence
  Cyclic GFR-binding peptide
VGRKPKVNSLQEVVNNASDYYVIPLPE

SEQ ID NO: 98225 - protein, 27 aa, Artificial Sequence
  Cyclic GFR-binding peptide
VGRKPKVNSLQEVKPTRGVYYLITLPE

SEQ ID NO: 98226 - protein, 27 aa, Artificial Sequence
  Cyclic GFR-binding peptide
VGRKPKVEYQKYIKPTKGIIFLISIPS

SEQ ID NO: 98227 - protein, 27 aa, Artificial Sequence
  Cyclic GFR-binding peptide
VGRKPKVEYQKYVVNNASDIFLISIPS

SEQ ID NO: 98228 - protein, 27 aa, Artificial Sequence
  Cyclic GFR-binding peptide
VGRKPKVNSLQEIVNSSDDYYVVPLPE

SEQ ID NO: 98229 - protein, 27 aa, Artificial Sequence
  Cyclic GFR-binding peptide
VGRKPKVNSLQEVVKDYEDYYVMPLPE

SEQ ID NO: 98230 - protein, 27 aa, Artificial Sequence
  Cyclic GFR-binding peptide
VGRKPKVEYQKYVVKENEDIFLMSIPS

SEQ ID NO: 98231 - protein, 27 aa, Artificial Sequence
  Cyclic GFR-binding peptide
VGRKPKVNSLQEVVKENEDYYVMPLPE

SEQ ID NO: 98232 - protein, 27 aa, Artificial Sequence
  Cyclic GFR-binding peptide
VGRKPKVEYQKYVVKDYEDIFLMSIPS

SEQ ID NO: 98233 - protein, 27 aa, Artificial Sequence
  Cyclic GFR-binding peptide
VGRKPKVQYNKLVVNNASDLYLISIAS

SEQ ID NO: 98234 - protein, 27 aa, Artificial Sequence
  Cyclic GFR-binding peptide
VGRKPKVNSLQEIKPTKGIYYLITLPE

SEQ ID NO: 98235 - protein, 27 aa, Artificial Sequence
  Cyclic GFR-binding peptide
VGRKPKVEYQKYVKPKRGVIFLISIPS

SEQ ID NO: 98236 - protein, 27 aa, Artificial Sequence
  Cyclic GFR-binding peptide
VGRKPKVRYKKLVVNNASDFYLISIAN

SEQ ID NO: 98237 - protein, 27 aa, Artificial Sequence
  Cyclic GFR-binding peptide
VGRKPKVNSLQEIVNSSDDYYLVTLPE

SEQ ID NO: 98238 - protein, 27 aa, Artificial Sequence
  Cyclic GFR-binding peptide
EPLTMLYYDEYDKVVEQLSNVGRKPKV

SEQ ID NO: 98239 - protein, 27 aa, Artificial Sequence
  Cyclic GFR-binding peptide
EPLPIVYYIGKTPKIEQLSNVGRKPKV

SEQ ID NO: 98240 - protein, 27 aa, Artificial Sequence
  Cyclic GFR-binding peptide
EPLTILYYVGRKPKVEQLSNVGRKPKV

SEQ ID NO: 98241 - protein, 27 aa, Artificial Sequence
  Cyclic GFR-binding peptide
EPLPIVYYVGRTPKVEQLSNVGRKPKV

SEQ ID NO: 98242 - protein, 27 aa, Artificial Sequence
  Cyclic GFR-binding peptide
SPISVLFIDDSSNVIYKQYEVGRKPKV

SEQ ID NO: 98243 - protein, 27 aa, Artificial Sequence
  Cyclic GFR-binding peptide
SPISILFIVGRTPKVYKQYEVGRKPKV

SEQ ID NO: 98244 - protein, 27 aa, Artificial Sequence
  Cyclic GFR-binding peptide
EPLTMLYYDENEKVVEQLSNVGRKPKV

SEQ ID NO: 98245 - protein, 27 aa, Artificial Sequence
  Cyclic GFR-binding peptide
EPLTILYYDSANNVVEQLSNVGRKPKV

SEQ ID NO: 98246 - protein, 27 aa, Artificial Sequence
  Cyclic GFR-binding peptide
EPLPIVYYVGRKPKVEQLSNVGRKPKV

SEQ ID NO: 98247 - protein, 27 aa, Artificial Sequence
  Cyclic GFR-binding peptide
EPLPIVYYDSANNVVEQLSNVGRKPKV

SEQ ID NO: 98248 - protein, 27 aa, Artificial Sequence
  Cyclic GFR-binding peptide
EPLTILYYVGRTPKVEQLSNVGRKPKV

SEQ ID NO: 98249 - protein, 27 aa, Artificial Sequence
  Cyclic GFR-binding peptide
SPISILFIIGKTPKIYKQYEVGRKPKV

SEQ ID NO: 98250 - protein, 27 aa, Artificial Sequence
  Cyclic GFR-binding peptide
SPISILFIDSANNVVYKQYEVGRKPKV

SEQ ID NO: 98251 - protein, 27 aa, Artificial Sequence
  Cyclic GFR-binding peptide
EPLPVVYYDDSSNVIEQLSNVGRKPKV

SEQ ID NO: 98252 - protein, 27 aa, Artificial Sequence
  Cyclic GFR-binding peptide
EPLPMVYYDEYDKVVEQLSNVGRKPKV

SEQ ID NO: 98253 - protein, 27 aa, Artificial Sequence
  Cyclic GFR-binding peptide
SPISMLFIDENEKVVYKQYEVGRKPKV

SEQ ID NO: 98254 - protein, 27 aa, Artificial Sequence
  Cyclic GFR-binding peptide
EPLPMVYYDENEKVVEQLSNVGRKPKV

SEQ ID NO: 98255 - protein, 27 aa, Artificial Sequence
  Cyclic GFR-binding peptide
SPISMLFIDEYDKVVYKQYEVGRKPKV

SEQ ID NO: 98256 - protein, 27 aa, Artificial Sequence
  Cyclic GFR-binding peptide
SAISILYLDSANNVVLKNYQVGRKPKV

SEQ ID NO: 98257 - protein, 27 aa, Artificial Sequence
  Cyclic GFR-binding peptide
EPLTILYYIGKTPKIEQLSNVGRKPKV

SEQ ID NO: 98258 - protein, 27 aa, Artificial Sequence
  Cyclic GFR-binding peptide
SPISILFIVGRKPKVYKQYEVGRKPKV

SEQ ID NO: 98259 - protein, 27 aa, Artificial Sequence
  Cyclic GFR-binding peptide
NAISILYFDSANNVVLKKYRVGRKPKV

SEQ ID NO: 98260 - protein, 27 aa, Artificial Sequence
  Cyclic GFR-binding peptide
EPLTVLYYDDSSNVIEQLSNVGRKPKV

SEQ ID NO: 98261 - protein, 29 aa, Artificial Sequence
  Cyclic GFR-binding peptide
VGRKPKVVTAKKLKPKKRVYEIKRVQVPR

SEQ ID NO: 98262 - protein, 29 aa, Artificial Sequence
  Cyclic GFR-binding peptide
VGRKPKVVQVEKLKPKKRVYEVKAVKVSR

SEQ ID NO: 98263 - protein, 29 aa, Artificial Sequence
  Cyclic GFR-binding peptide
VGRKPKVVQVEKFIPKKRVIEVKAVKVSR

SEQ ID NO: 98264 - protein, 29 aa, Artificial Sequence
  Cyclic GFR-binding peptide
VGRKPKVVQVEKHQGQHPKIRVKAMKVSR

SEQ ID NO: 98265 - protein, 29 aa, Artificial Sequence
  Cyclic GFR-binding peptide
VGRKPKVVTAKKHQGQHPKIRIKRMQVPR

SEQ ID NO: 98266 - protein, 29 aa, Artificial Sequence
  Cyclic GFR-binding peptide
VGRKPKVSMEGLLKPKKRVYEMIQVTINS

SEQ ID NO: 98267 - protein, 29 aa, Artificial Sequence
  Cyclic GFR-binding peptide
VGRKPKVSMEGIFIPKKRVIEMIQVTINS

SEQ ID NO: 98268 - protein, 29 aa, Artificial Sequence
  Cyclic GFR-binding peptide
VGRKPKVSMEGLHQGQHPKIRMIQMTINS

SEQ ID NO: 98269 - protein, 29 aa, Artificial Sequence
  Cyclic GFR-binding peptide
VGRKPKVSMEGILKPKKRVYEMIQVTINS

SEQ ID NO: 98270 - protein, 29 aa, Artificial Sequence
  Cyclic GFR-binding peptide
VGRKPKVSMEGLFIPKKRVIEMIQVTINS

SEQ ID NO: 98271 - protein, 29 aa, Artificial Sequence
  Cyclic GFR-binding peptide
VGRKPKVVTAKKFIPKKRVIEIKRVQVPR

SEQ ID NO: 98272 - protein, 29 aa, Artificial Sequence
  Cyclic GFR-binding peptide
VGRKPKVSMEGIHQGQHPKIRMIQMTINS

SEQ ID NO: 98273 - protein, 29 aa, Artificial Sequence
  Cyclic GFR-binding peptide
RPVQVRKIEYVRKKPKLKKATVVGRKPKV

SEQ ID NO: 98274 - protein, 29 aa, Artificial Sequence
  Cyclic GFR-binding peptide
RSVKVAKVEYVRKKPKLKEVQVVGRKPKV

SEQ ID NO: 98275 - protein, 29 aa, Artificial Sequence
  Cyclic GFR-binding peptide
RSVKVAKVEIVRKKPIFKEVQVVGRKPKV

SEQ ID NO: 98276 - protein, 29 aa, Artificial Sequence
  Cyclic GFR-binding peptide
RSVKMAKVRIKPHQGQHKEVQVVGRKPKV

SEQ ID NO: 98277 - protein, 29 aa, Artificial Sequence
  Cyclic GFR-binding peptide
RPVQMRKIRIKPHQGQHKKATVVGRKPKV

SEQ ID NO: 98278 - protein, 29 aa, Artificial Sequence
  Cyclic GFR-binding peptide
SNITVQIMEYVRKKPKLLGEMSVGRKPKV

SEQ ID NO: 98279 - protein, 29 aa, Artificial Sequence
  Cyclic GFR-binding peptide
SNITVQIMEIVRKKPIFIGEMSVGRKPKV

SEQ ID NO: 98280 - protein, 29 aa, Artificial Sequence
  Cyclic GFR-binding peptide
SNITMQIMRIKPHQGQHLGEMSVGRKPKV

SEQ ID NO: 98281 - protein, 29 aa, Artificial Sequence
  Cyclic GFR-binding peptide
SNITVQIMEYVRKKPKLIGEMSVGRKPKV

SEQ ID NO: 98282 - protein, 29 aa, Artificial Sequence
  Cyclic GFR-binding peptide
SNITVQIMEIVRKKPIFLGEMSVGRKPKV

SEQ ID NO: 98283 - protein, 29 aa, Artificial Sequence
  Cyclic GFR-binding peptide
RPVQVRKIEIVRKKPIFKKATVVGRKPKV

SEQ ID NO: 98284 - protein, 29 aa, Artificial Sequence
  Cyclic GFR-binding peptide
SNITMQIMRIKPHQGQHIGEMSVGRKPKV

SEQ ID NO: 98285 - protein, 27 aa, Artificial Sequence
  Cyclic GFR-binding peptide
VGRKPKVEYKFKVKPTRGVLYLISIPE

SEQ ID NO: 98286 - protein, 27 aa, Artificial Sequence
  Cyclic GFR-binding peptide
VGRKPKVEYKFKTPVGMDDLYLVSIPE

SEQ ID NO: 98287 - protein, 27 aa, Artificial Sequence
  Cyclic GFR-binding peptide
VGRKPKVEYQKYVKPKRGVIYLISIPS

SEQ ID NO: 98288 - protein, 27 aa, Artificial Sequence
  Cyclic GFR-binding peptide
VGRKPKVEYQKYVVKDYEDIYLMSIPS

SEQ ID NO: 98289 - protein, 27 aa, Artificial Sequence
  Cyclic GFR-binding peptide
VGRKPKVEYKFKIKPTKGILYLISIPE

SEQ ID NO: 98290 - protein, 27 aa, Artificial Sequence
  Cyclic GFR-binding peptide
VGRKPKVYHYKLYTVVGKDKYLISIPS

SEQ ID NO: 98291 - protein, 27 aa, Artificial Sequence
  Cyclic GFR-binding peptide
VGRKPKVRYKKLYTVVGKDFYLISIAN

SEQ ID NO: 98292 - protein, 27 aa, Artificial Sequence
  Cyclic GFR-binding peptide
VGRKPKVEYQKYVVNNAADIYLISIPS

SEQ ID NO: 98293 - protein, 27 aa, Artificial Sequence
  Cyclic GFR-binding peptide
VGRKPKVEYQKYVKPTRGVIYLISIPS

SEQ ID NO: 98294 - protein, 27 aa, Artificial Sequence
  Cyclic GFR-binding peptide
VGRKPKVEYQKYTPVGMDDIYLVSIPS

SEQ ID NO: 98295 - protein, 27 aa, Artificial Sequence
  Cyclic GFR-binding peptide
VGRKPKVEYKFKVVKDYEDLYLMSIPE

SEQ ID NO: 98296 - protein, 27 aa, Artificial Sequence
  Cyclic GFR-binding peptide
VGRKPKVEYKFKVVNNAADLYLISIPE

SEQ ID NO: 98297 - protein, 27 aa, Artificial Sequence
  Cyclic GFR-binding peptide
VGRKPKVEYQKYVVKENEDIYLMSIPS

SEQ ID NO: 98298 - protein, 27 aa, Artificial Sequence
  Cyclic GFR-binding peptide
VGRKPKVEYQKYIKPTKGIIYLISIPS

SEQ ID NO: 98299 - protein, 27 aa, Artificial Sequence
  Cyclic GFR-binding peptide
VGRKPKVRYKKLVVNNAADFYLISIAN

SEQ ID NO: 98300 - protein, 27 aa, Artificial Sequence
  Cyclic GFR-binding peptide
VGRKPKVYHYKLVVNNAADKYLISIPS

SEQ ID NO: 98301 - protein, 27 aa, Artificial Sequence
  Cyclic GFR-binding peptide
VGRKPKVEYKFKIVNNSSDLYLVSIPE

SEQ ID NO: 98302 - protein, 27 aa, Artificial Sequence
  Cyclic GFR-binding peptide
VGRKPKVEYQKYIVNSSDDIYLVSIPS

SEQ ID NO: 98303 - protein, 27 aa, Artificial Sequence
  Cyclic GFR-binding peptide
VGRKPKVEYKFKIVNSSDDLYLVSIPE

SEQ ID NO: 98304 - protein, 27 aa, Artificial Sequence
  Cyclic GFR-binding peptide
VGRKPKVEYKFKVKPKRGVLYLISIPE

SEQ ID NO: 98305 - protein, 27 aa, Artificial Sequence
  Cyclic GFR-binding peptide
VGRKPKVEYQKYYTVVGKDIYLISIPS

SEQ ID NO: 98306 - protein, 27 aa, Artificial Sequence
  Cyclic GFR-binding peptide
VGRKPKVEYKFKVVKENEDLYLMSIPE

SEQ ID NO: 98307 - protein, 27 aa, Artificial Sequence
  Cyclic GFR-binding peptide
VGRKPKVEYQKYIVNNSSDIYLVSIPS

SEQ ID NO: 98308 - protein, 27 aa, Artificial Sequence
  Cyclic GFR-binding peptide
VGRKPKVEYKFKYTVVGKDLYLISIPE

SEQ ID NO: 98309 - protein, 27 aa, Artificial Sequence
  Cyclic GFR-binding peptide
EPISILYLVGRTPKVKFKYEVGRKPKV

SEQ ID NO: 98310 - protein, 27 aa, Artificial Sequence
  Cyclic GFR-binding peptide
EPISVLYLDDMGVPTKFKYEVGRKPKV

SEQ ID NO: 98311 - protein, 27 aa, Artificial Sequence
  Cyclic GFR-binding peptide
SPISILYIVGRKPKVYKQYEVGRKPKV

SEQ ID NO: 98312 - protein, 27 aa, Artificial Sequence
  Cyclic GFR-binding peptide
SPISMLYIDEYDKVVYKQYEVGRKPKV

SEQ ID NO: 98313 - protein, 27 aa, Artificial Sequence
  Cyclic GFR-binding peptide
EPISILYLIGKTPKIKFKYEVGRKPKV

SEQ ID NO: 98314 - protein, 27 aa, Artificial Sequence
  Cyclic GFR-binding peptide
SPISILYKDKGVVTYLKYHYVGRKPKV

SEQ ID NO: 98315 - protein, 27 aa, Artificial Sequence
  Cyclic GFR-binding peptide
NAISILYFDKGVVTYLKKYRVGRKPKV

SEQ ID NO: 98316 - protein, 27 aa, Artificial Sequence
  Cyclic GFR-binding peptide
SPISILYIDAANNVVYKQYEVGRKPKV

SEQ ID NO: 98317 - protein, 27 aa, Artificial Sequence
  Cyclic GFR-binding peptide
SPISILYIVGRTPKVYKQYEVGRKPKV

SEQ ID NO: 98318 - protein, 27 aa, Artificial Sequence
  Cyclic GFR-binding peptide
SPISVLYIDDMGVPTYKQYEVGRKPKV

SEQ ID NO: 98319 - protein, 27 aa, Artificial Sequence
  Cyclic GFR-binding peptide
EPISMLYLDEYDKVVKFKYEVGRKPKV

SEQ ID NO: 98320 - protein, 27 aa, Artificial Sequence
  Cyclic GFR-binding peptide
EPISILYLDAANNVVKFKYEVGRKPKV

SEQ ID NO: 98321 - protein, 27 aa, Artificial Sequence
  Cyclic GFR-binding peptide
SPISMLYIDENEKVVYKQYEVGRKPKV

SEQ ID NO: 98322 - protein, 27 aa, Artificial Sequence
  Cyclic GFR-binding peptide
SPISILYIIGKTPKIYKQYEVGRKPKV

SEQ ID NO: 98323 - protein, 27 aa, Artificial Sequence
  Cyclic GFR-binding peptide
NAISILYFDAANNVVLKKYRVGRKPKV

SEQ ID NO: 98324 - protein, 27 aa, Artificial Sequence
  Cyclic GFR-binding peptide
SPISILYKDAANNVVLKYHYVGRKPKV

SEQ ID NO: 98325 - protein, 27 aa, Artificial Sequence
  Cyclic GFR-binding peptide
EPISVLYLDSSNNVIKFKYEVGRKPKV

SEQ ID NO: 98326 - protein, 27 aa, Artificial Sequence
  Cyclic GFR-binding peptide
SPISVLYIDDSSNVIYKQYEVGRKPKV

SEQ ID NO: 98327 - protein, 27 aa, Artificial Sequence
  Cyclic GFR-binding peptide
EPISVLYLDDSSNVIKFKYEVGRKPKV

SEQ ID NO: 98328 - protein, 27 aa, Artificial Sequence
  Cyclic GFR-binding peptide
EPISILYLVGRKPKVKFKYEVGRKPKV

SEQ ID NO: 98329 - protein, 27 aa, Artificial Sequence
  Cyclic GFR-binding peptide
SPISILYIDKGVVTYYKQYEVGRKPKV

SEQ ID NO: 98330 - protein, 27 aa, Artificial Sequence
  Cyclic GFR-binding peptide
EPISMLYLDENEKVVKFKYEVGRKPKV

SEQ ID NO: 98331 - protein, 27 aa, Artificial Sequence
  Cyclic GFR-binding peptide
SPISVLYIDSSNNVIYKQYEVGRKPKV

SEQ ID NO: 98332 - protein, 27 aa, Artificial Sequence
  Cyclic GFR-binding peptide
EPISILYLDKGVVTYKFKYEVGRKPKV

SEQ ID NO: 98333 - protein, 27 aa, Artificial Sequence
  Cyclic GFR-binding peptide
VGRKPKVPIKGYIIQQKDNFYLMNIPS

SEQ ID NO: 98334 - protein, 27 aa, Artificial Sequence
  Cyclic GFR-binding peptide
VGRKPKVPIKGYVVKDYEDFYLMNIPS

SEQ ID NO: 98335 - protein, 27 aa, Artificial Sequence
  Cyclic GFR-binding peptide
VGRKPKVPIKGYIVNSSDDFYLVNIPS

SEQ ID NO: 98336 - protein, 27 aa, Artificial Sequence
  Cyclic GFR-binding peptide
VGRKPKVPIKGYVVNNAADFYLINIPS

SEQ ID NO: 98337 - protein, 27 aa, Artificial Sequence
  Cyclic GFR-binding peptide
VGRKPKVPIKGYYTVVGKDFYLINIPS

SEQ ID NO: 98338 - protein, 27 aa, Artificial Sequence
  Cyclic GFR-binding peptide
VGRKPKVPIKGYLLVRGNDFYLMNIPS

SEQ ID NO: 98339 - protein, 27 aa, Artificial Sequence
  Cyclic GFR-binding peptide
VGRKPKVPIKGYVVKENEDFYLMNIPS

SEQ ID NO: 98340 - protein, 27 aa, Artificial Sequence
  Cyclic GFR-binding peptide
VGRKPKVPIKGYVVNNASDFYLINIPS

SEQ ID NO: 98341 - protein, 27 aa, Artificial Sequence
  Cyclic GFR-binding peptide
VGRKPKVPIKGYTPVGMDDFYLVNIPS

SEQ ID NO: 98342 - protein, 27 aa, Artificial Sequence
  Cyclic GFR-binding peptide
VGRKPKVPIKGYIVNNSSDFYLVNIPS

SEQ ID NO: 98343 - protein, 27 aa, Artificial Sequence
  Cyclic GFR-binding peptide
SPINMLYFNDKQQIIYGKIPVGRKPKV

SEQ ID NO: 98344 - protein, 27 aa, Artificial Sequence
  Cyclic GFR-binding peptide
SPINMLYFDEYDKVVYGKIPVGRKPKV

SEQ ID NO: 98345 - protein, 27 aa, Artificial Sequence
  Cyclic GFR-binding peptide
SPINVLYFDDSSNVIYGKIPVGRKPKV

SEQ ID NO: 98346 - protein, 27 aa, Artificial Sequence
  Cyclic GFR-binding peptide
SPINILYFDAANNVVYGKIPVGRKPKV

SEQ ID NO: 98347 - protein, 27 aa, Artificial Sequence
  Cyclic GFR-binding peptide
SPINILYFDKGVVTYYGKIPVGRKPKV

SEQ ID NO: 98348 - protein, 27 aa, Artificial Sequence
  Cyclic GFR-binding peptide
SPINMLYFDNGRVLLYGKIPVGRKPKV

SEQ ID NO: 98349 - protein, 27 aa, Artificial Sequence
  Cyclic GFR-binding peptide
SPINMLYFDENEKVVYGKIPVGRKPKV

SEQ ID NO: 98350 - protein, 27 aa, Artificial Sequence
  Cyclic GFR-binding peptide
SPINILYFDSANNVVYGKIPVGRKPKV

SEQ ID NO: 98351 - protein, 27 aa, Artificial Sequence
  Cyclic GFR-binding peptide
SPINVLYFDDMGVPTYGKIPVGRKPKV

SEQ ID NO: 98352 - protein, 27 aa, Artificial Sequence
  Cyclic GFR-binding peptide
SPINVLYFDSSNNVIYGKIPVGRKPKV

SEQ ID NO: 98353 - protein, 27 aa, Artificial Sequence
  Cyclic GFR-binding peptide
VGRKPKVEYQKYVVNNASDIYLISIPS

SEQ ID NO: 98354 - protein, 27 aa, Artificial Sequence
  Cyclic GFR-binding peptide
VGRKPKVEYQKYIIQQKDNIYLMSIPS

SEQ ID NO: 98355 - protein, 27 aa, Artificial Sequence
  Cyclic GFR-binding peptide
VGRKPKVEYQKYLLVRGNDIYLMSIPS

SEQ ID NO: 98356 - protein, 27 aa, Artificial Sequence
  Cyclic GFR-binding peptide
SPISILYIDSANNVVYKQYEVGRKPKV

SEQ ID NO: 98357 - protein, 27 aa, Artificial Sequence
  Cyclic GFR-binding peptide
SPISMLYINDKQQIIYKQYEVGRKPKV

SEQ ID NO: 98358 - protein, 27 aa, Artificial Sequence
  Cyclic GFR-binding peptide
SPISMLYIDNGRVLLYKQYEVGRKPKV

SEQ ID NO: 98359 - protein, 27 aa, Artificial Sequence
  Cyclic GFR-binding peptide
VGRKPKVPYVKLYTVVGKDFFLISLSS

SEQ ID NO: 98360 - protein, 27 aa, Artificial Sequence
  Cyclic GFR-binding peptide
VGRKPKVPYVKLIKPTKGIFFLISLSS

SEQ ID NO: 98361 - protein, 27 aa, Artificial Sequence
  Cyclic GFR-binding peptide
VGRKPKVPYVKLIIQQKDNFFLMSLSS

SEQ ID NO: 98362 - protein, 27 aa, Artificial Sequence
  Cyclic GFR-binding peptide
VGRKPKVPYVKLIVNSSDDFFLVSLSS

SEQ ID NO: 98363 - protein, 27 aa, Artificial Sequence
  Cyclic GFR-binding peptide
VGRKPKVPYVKLVKPKRGVFFLISLSS

SEQ ID NO: 98364 - protein, 27 aa, Artificial Sequence
  Cyclic GFR-binding peptide
VGRKPKVPYVKLVKPTRGVFFLISLSS

SEQ ID NO: 98365 - protein, 27 aa, Artificial Sequence
  Cyclic GFR-binding peptide
VGRKPKVPYVKLTPVGMDDFFLVSLSS

SEQ ID NO: 98366 - protein, 29 aa, Artificial Sequence
  Cyclic GFR-binding peptide
VGRKPKVPYVKLHQGQHPKIRFFLMSLSS

SEQ ID NO: 98367 - protein, 27 aa, Artificial Sequence
  Cyclic GFR-binding peptide
VGRKPKVPYVKLVVNKNEDFFLISLSS

SEQ ID NO: 98368 - protein, 27 aa, Artificial Sequence
  Cyclic GFR-binding peptide
VGRKPKVPYVKLVVNNASDFFLISLSS

SEQ ID NO: 98369 - protein, 27 aa, Artificial Sequence
  Cyclic GFR-binding peptide
VGRKPKVPYVKLVVKENEDFFLMSLSS

SEQ ID NO: 98370 - protein, 27 aa, Artificial Sequence
  Cyclic GFR-binding peptide
VGRKPKVPYVKLIVNNSSDFFLVSLSS

SEQ ID NO: 98371 - protein, 29 aa, Artificial Sequence
  Cyclic GFR-binding peptide
VGRKPKVPYVKLLKPKKRVYEFFLVSLSS

SEQ ID NO: 98372 - protein, 27 aa, Artificial Sequence
  Cyclic GFR-binding peptide
VGRKPKVPYVKLLLVRGNDFFLMSLSS

SEQ ID NO: 98373 - protein, 27 aa, Artificial Sequence
  Cyclic GFR-binding peptide
VGRKPKVPYVKLVVKDYEDFFLMSLSS

SEQ ID NO: 98374 - protein, 27 aa, Artificial Sequence
  Cyclic GFR-binding peptide
VGRKPKVPYVKLVVNNAADFFLISLSS

SEQ ID NO: 98375 - protein, 27 aa, Artificial Sequence
  Cyclic GFR-binding peptide
SSLSILFFDKGVVTYLKVYPVGRKPKV

SEQ ID NO: 98376 - protein, 27 aa, Artificial Sequence
  Cyclic GFR-binding peptide
SSLSILFFIGKTPKILKVYPVGRKPKV

SEQ ID NO: 98377 - protein, 27 aa, Artificial Sequence
  Cyclic GFR-binding peptide
SSLSMLFFNDKQQIILKVYPVGRKPKV

SEQ ID NO: 98378 - protein, 27 aa, Artificial Sequence
  Cyclic GFR-binding peptide
SSLSVLFFDDSSNVILKVYPVGRKPKV

SEQ ID NO: 98379 - protein, 27 aa, Artificial Sequence
  Cyclic GFR-binding peptide
SSLSILFFVGRKPKVLKVYPVGRKPKV

SEQ ID NO: 98380 - protein, 27 aa, Artificial Sequence
  Cyclic GFR-binding peptide
SSLSILFFVGRTPKVLKVYPVGRKPKV

SEQ ID NO: 98381 - protein, 27 aa, Artificial Sequence
  Cyclic GFR-binding peptide
SSLSVLFFDDMGVPTLKVYPVGRKPKV

SEQ ID NO: 98382 - protein, 29 aa, Artificial Sequence
  Cyclic GFR-binding peptide
SSLSMLFFRIKPHQGQHLKVYPVGRKPKV

SEQ ID NO: 98383 - protein, 27 aa, Artificial Sequence
  Cyclic GFR-binding peptide
SSLSILFFDENKNVVLKVYPVGRKPKV

SEQ ID NO: 98384 - protein, 27 aa, Artificial Sequence
  Cyclic GFR-binding peptide
SSLSILFFDSANNVVLKVYPVGRKPKV

SEQ ID NO: 98385 - protein, 27 aa, Artificial Sequence
  Cyclic GFR-binding peptide
SSLSMLFFDENEKVVLKVYPVGRKPKV

SEQ ID NO: 98386 - protein, 27 aa, Artificial Sequence
  Cyclic GFR-binding peptide
SSLSVLFFDSSNNVILKVYPVGRKPKV

SEQ ID NO: 98387 - protein, 29 aa, Artificial Sequence
  Cyclic GFR-binding peptide
SSLSVLFFEYVRKKPKLLKVYPVGRKPKV

SEQ ID NO: 98388 - protein, 27 aa, Artificial Sequence
  Cyclic GFR-binding peptide
SSLSMLFFDNGRVLLLKVYPVGRKPKV

SEQ ID NO: 98389 - protein, 27 aa, Artificial Sequence
  Cyclic GFR-binding peptide
SSLSMLFFDEYDKVVLKVYPVGRKPKV

SEQ ID NO: 98390 - protein, 27 aa, Artificial Sequence
  Cyclic GFR-binding peptide
SSLSILFFDAANNVVLKVYPVGRKPKV

SEQ ID NO: 98391 - protein, 27 aa, Artificial Sequence
  Cyclic GFR-binding peptide
VGRKPKVSMEGIIVNSSDDMIQVTINS

SEQ ID NO: 98392 - protein, 27 aa, Artificial Sequence
  Cyclic GFR-binding peptide
VGRKPKVVTAKKVVKENEDIKRMQVPR

SEQ ID NO: 98393 - protein, 27 aa, Artificial Sequence
  Cyclic GFR-binding peptide
VGRKPKVSMEGIVVKDYEDMIQMTINS

SEQ ID NO: 98394 - protein, 27 aa, Artificial Sequence
  Cyclic GFR-binding peptide
VGRKPKVVTAKKIKPTKGIIKRIQVPR

SEQ ID NO: 98395 - protein, 27 aa, Artificial Sequence
  Cyclic GFR-binding peptide
VGRKPKVSMEGIVKPTRGVMIQITINS

SEQ ID NO: 98396 - protein, 29 aa, Artificial Sequence
  Cyclic GFR-binding peptide
VGRKPKVNSLQEFIPKKRVIEYYVVPLPE

SEQ ID NO: 98397 - protein, 27 aa, Artificial Sequence
  Cyclic GFR-binding peptide
VGRKPKVVQVEKVKPKRGVVKAIKVSR

SEQ ID NO: 98398 - protein, 27 aa, Artificial Sequence
  Cyclic GFR-binding peptide
VGRKPKVVQVEKVVKENEDVKAMKVSR

SEQ ID NO: 98399 - protein, 27 aa, Artificial Sequence
  Cyclic GFR-binding peptide
VGRKPKVVTAKKIVNSSDDIKRVQVPR

SEQ ID NO: 98400 - protein, 27 aa, Artificial Sequence
  Cyclic GFR-binding peptide
VGRKPKVVQVEKIKPTKGIVKAIKVSR

SEQ ID NO: 98401 - protein, 29 aa, Artificial Sequence
  Cyclic GFR-binding peptide
VGRKPKVNSLQEFIPKKRVIEYYLVTLPE

SEQ ID NO: 98402 - protein, 27 aa, Artificial Sequence
  Cyclic GFR-binding peptide
VGRKPKVVQVEKIVNSSDDVKAVKVSR

SEQ ID NO: 98403 - protein, 27 aa, Artificial Sequence
  Cyclic GFR-binding peptide
VGRKPKVVTAKKVKPKRGVIKRIQVPR

SEQ ID NO: 98404 - protein, 27 aa, Artificial Sequence
  Cyclic GFR-binding peptide
VGRKPKVVQVEKVKPTRGVVKAIKVSR

SEQ ID NO: 98405 - protein, 27 aa, Artificial Sequence
  Cyclic GFR-binding peptide
VGRKPKVVTAKKVKPTRGVIKRIQVPR

SEQ ID NO: 98406 - protein, 29 aa, Artificial Sequence
  Cyclic GFR-binding peptide
VGRKPKVNSLQELKPKKRVYEYYLVTLPE

SEQ ID NO: 98407 - protein, 27 aa, Artificial Sequence
  Cyclic GFR-binding peptide
VGRKPKVSMEGIVKPKRGVMIQITINS

SEQ ID NO: 98408 - protein, 27 aa, Artificial Sequence
  Cyclic GFR-binding peptide
VGRKPKVSMEGIVVKENEDMIQMTINS

SEQ ID NO: 98409 - protein, 27 aa, Artificial Sequence
  Cyclic GFR-binding peptide
VGRKPKVSMEGIIKPTKGIMIQITINS

SEQ ID NO: 98410 - protein, 29 aa, Artificial Sequence
  Cyclic GFR-binding peptide
VGRKPKVNSLQEHQGQHPKIRYYLMTLPE

SEQ ID NO: 98411 - protein, 27 aa, Artificial Sequence
  Cyclic GFR-binding peptide
VGRKPKVVTAKKVVKDYEDIKRMQVPR

SEQ ID NO: 98412 - protein, 29 aa, Artificial Sequence
  Cyclic GFR-binding peptide
VGRKPKVNSLQEHQGQHPKIRYYVMPLPE

SEQ ID NO: 98413 - protein, 29 aa, Artificial Sequence
  Cyclic GFR-binding peptide
VGRKPKVNSLQELKPKKRVYEYYVVPLPE

SEQ ID NO: 98414 - protein, 27 aa, Artificial Sequence
  Cyclic GFR-binding peptide
VGRKPKVVQVEKVVKDYEDVKAMKVSR

SEQ ID NO: 98415 - protein, 27 aa, Artificial Sequence
  Cyclic GFR-binding peptide
SNITVQIMDDSSNVIIGEMSVGRKPKV

SEQ ID NO: 98416 - protein, 27 aa, Artificial Sequence
  Cyclic GFR-binding peptide
RPVQMRKIDENEKVVKKATVVGRKPKV

SEQ ID NO: 98417 - protein, 27 aa, Artificial Sequence
  Cyclic GFR-binding peptide
SNITMQIMDEYDKVVIGEMSVGRKPKV

SEQ ID NO: 98418 - protein, 27 aa, Artificial Sequence
  Cyclic GFR-binding peptide
RPVQIRKIIGKTPKIKKATVVGRKPKV

SEQ ID NO: 98419 - protein, 27 aa, Artificial Sequence
  Cyclic GFR-binding peptide
SNITIQIMVGRTPKVIGEMSVGRKPKV

SEQ ID NO: 98420 - protein, 29 aa, Artificial Sequence
  Cyclic GFR-binding peptide
EPLPVVYYEIVRKKPIFEQLSNVGRKPKV

SEQ ID NO: 98421 - protein, 27 aa, Artificial Sequence
  Cyclic GFR-binding peptide
RSVKIAKVVGRKPKVKEVQVVGRKPKV

SEQ ID NO: 98422 - protein, 27 aa, Artificial Sequence
  Cyclic GFR-binding peptide
RSVKMAKVDENEKVVKEVQVVGRKPKV

SEQ ID NO: 98423 - protein, 27 aa, Artificial Sequence
  Cyclic GFR-binding peptide
RPVQVRKIDDSSNVIKKATVVGRKPKV

SEQ ID NO: 98424 - protein, 27 aa, Artificial Sequence
  Cyclic GFR-binding peptide
RSVKIAKVIGKTPKIKEVQVVGRKPKV

SEQ ID NO: 98425 - protein, 29 aa, Artificial Sequence
  Cyclic GFR-binding peptide
EPLTVLYYEIVRKKPIFEQLSNVGRKPKV

SEQ ID NO: 98426 - protein, 27 aa, Artificial Sequence
  Cyclic GFR-binding peptide
RSVKVAKVDDSSNVIKEVQVVGRKPKV

SEQ ID NO: 98427 - protein, 27 aa, Artificial Sequence
  Cyclic GFR-binding peptide
RPVQIRKIVGRKPKVKKATVVGRKPKV

SEQ ID NO: 98428 - protein, 27 aa, Artificial Sequence
  Cyclic GFR-binding peptide
RSVKIAKVVGRTPKVKEVQVVGRKPKV

SEQ ID NO: 98429 - protein, 27 aa, Artificial Sequence
  Cyclic GFR-binding peptide
RPVQIRKIVGRTPKVKKATVVGRKPKV

SEQ ID NO: 98430 - protein, 29 aa, Artificial Sequence
  Cyclic GFR-binding peptide
EPLTVLYYEYVRKKPKLEQLSNVGRKPKV

SEQ ID NO: 98431 - protein, 27 aa, Artificial Sequence
  Cyclic GFR-binding peptide
SNITIQIMVGRKPKVIGEMSVGRKPKV

SEQ ID NO: 98432 - protein, 27 aa, Artificial Sequence
  Cyclic GFR-binding peptide
SNITMQIMDENEKVVIGEMSVGRKPKV

SEQ ID NO: 98433 - protein, 27 aa, Artificial Sequence
  Cyclic GFR-binding peptide
SNITIQIMIGKTPKIIGEMSVGRKPKV

SEQ ID NO: 98434 - protein, 29 aa, Artificial Sequence
  Cyclic GFR-binding peptide
EPLTMLYYRIKPHQGQHEQLSNVGRKPKV

SEQ ID NO: 98435 - protein, 27 aa, Artificial Sequence
  Cyclic GFR-binding peptide
RPVQMRKIDEYDKVVKKATVVGRKPKV

SEQ ID NO: 98436 - protein, 29 aa, Artificial Sequence
  Cyclic GFR-binding peptide
EPLPMVYYRIKPHQGQHEQLSNVGRKPKV

SEQ ID NO: 98437 - protein, 29 aa, Artificial Sequence
  Cyclic GFR-binding peptide
EPLPVVYYEYVRKKPKLEQLSNVGRKPKV

SEQ ID NO: 98438 - protein, 27 aa, Artificial Sequence
  Cyclic GFR-binding peptide
RSVKMAKVDEYDKVVKEVQVVGRKPKV

SEQ ID NO: 98439 - protein, 27 aa, Artificial Sequence
  Cyclic GFR-binding peptide
VGRKPKVRYKKLIIQQKDNFYLMSIAN

SEQ ID NO: 98440 - protein, 27 aa, Artificial Sequence
  Cyclic GFR-binding peptide
VGRKPKVRYKKLLLVRGNDFYLMSIAN

SEQ ID NO: 98441 - protein, 27 aa, Artificial Sequence
  Cyclic GFR-binding peptide
NAISMLYFNDKQQIILKKYRVGRKPKV

SEQ ID NO: 98442 - protein, 27 aa, Artificial Sequence
  Cyclic GFR-binding peptide
NAISMLYFDNGRVLLLKKYRVGRKPKV

SEQ ID NO: 98443 - protein, 27 aa, Artificial Sequence
  Cyclic GFR-binding peptide
VGRKPKVEYKFKVVNKNEDLYLISIPE

SEQ ID NO: 98444 - protein, 27 aa, Artificial Sequence
  Cyclic GFR-binding peptide
VGRKPKVPIKGYVKPTRGVFYLINIPS

SEQ ID NO: 98445 - protein, 27 aa, Artificial Sequence
  Cyclic GFR-binding peptide
VGRKPKVEYKFKLLVRGNDLYLMSIPE

SEQ ID NO: 98446 - protein, 27 aa, Artificial Sequence
  Cyclic GFR-binding peptide
VGRKPKVYHYKLVVNKNEDKYLISIPS

SEQ ID NO: 98447 - protein, 27 aa, Artificial Sequence
  Cyclic GFR-binding peptide
VGRKPKVRHKRLLLVRGNDYYLMSTAS

SEQ ID NO: 98448 - protein, 27 aa, Artificial Sequence
  Cyclic GFR-binding peptide
VGRKPKVYHYKLLLVRGNDKYLMSIPS

SEQ ID NO: 98449 - protein, 27 aa, Artificial Sequence
  Cyclic GFR-binding peptide
VGRKPKVRHKRLVVNKNEDYYLISTAS

SEQ ID NO: 98450 - protein, 27 aa, Artificial Sequence
  Cyclic GFR-binding peptide
VGRKPKVRYKKLVVNKNEDFYLISIAN

SEQ ID NO: 98451 - protein, 27 aa, Artificial Sequence
  Cyclic GFR-binding peptide
VGRKPKVPIKGYVVNKNEDFYLINIPS

SEQ ID NO: 98452 - protein, 27 aa, Artificial Sequence
  Cyclic GFR-binding peptide
VGRKPKVPIKGYIKPTKGIFYLINIPS

SEQ ID NO: 98453 - protein, 27 aa, Artificial Sequence
  Cyclic GFR-binding peptide
VGRKPKVRHKRLYTVVGKDYYLISTAS

SEQ ID NO: 98454 - protein, 27 aa, Artificial Sequence
  Cyclic GFR-binding peptide
VGRKPKVEYKFKVVNNASDLYLISIPE

SEQ ID NO: 98455 - protein, 27 aa, Artificial Sequence
  Cyclic GFR-binding peptide
VGRKPKVRHKRLIIQQKDNYYLMSTAS

SEQ ID NO: 98456 - protein, 27 aa, Artificial Sequence
  Cyclic GFR-binding peptide
VGRKPKVEYKFKIIQQKDNLYLMSIPE

SEQ ID NO: 98457 - protein, 27 aa, Artificial Sequence
  Cyclic GFR-binding peptide
VGRKPKVPIKGYVKPKRGVFYLINIPS

SEQ ID NO: 98458 - protein, 27 aa, Artificial Sequence
  Cyclic GFR-binding peptide
VGRKPKVRHKRLVVNNASDYYLISTAS

SEQ ID NO: 98459 - protein, 27 aa, Artificial Sequence
  Cyclic GFR-binding peptide
VGRKPKVYHYKLVVNNASDKYLISIPS

SEQ ID NO: 98460 - protein, 27 aa, Artificial Sequence
  Cyclic GFR-binding peptide
VGRKPKVYHYKLIIQQKDNKYLMSIPS

SEQ ID NO: 98461 - protein, 27 aa, Artificial Sequence
  Cyclic GFR-binding peptide
VGRKPKVRHKRLVVNNAADYYLISTAS

SEQ ID NO: 98462 - protein, 27 aa, Artificial Sequence
  Cyclic GFR-binding peptide
EPISILYLDENKNVVKFKYEVGRKPKV

SEQ ID NO: 98463 - protein, 27 aa, Artificial Sequence
  Cyclic GFR-binding peptide
SPINILYFVGRTPKVYGKIPVGRKPKV

SEQ ID NO: 98464 - protein, 27 aa, Artificial Sequence
  Cyclic GFR-binding peptide
EPISMLYLDNGRVLLKFKYEVGRKPKV

SEQ ID NO: 98465 - protein, 27 aa, Artificial Sequence
  Cyclic GFR-binding peptide
SPISILYKDENKNVVLKYHYVGRKPKV

SEQ ID NO: 98466 - protein, 27 aa, Artificial Sequence
  Cyclic GFR-binding peptide
SATSMLYYDNGRVLLLRKHRVGRKPKV

SEQ ID NO: 98467 - protein, 27 aa, Artificial Sequence
  Cyclic GFR-binding peptide
SPISMLYKDNGRVLLLKYHYVGRKPKV

SEQ ID NO: 98468 - protein, 27 aa, Artificial Sequence
  Cyclic GFR-binding peptide
SATSILYYDENKNVVLRKHRVGRKPKV

SEQ ID NO: 98469 - protein, 27 aa, Artificial Sequence
  Cyclic GFR-binding peptide
NAISILYFDENKNVVLKKYRVGRKPKV

SEQ ID NO: 98470 - protein, 27 aa, Artificial Sequence
  Cyclic GFR-binding peptide
SPINILYFDENKNVVYGKIPVGRKPKV

SEQ ID NO: 98471 - protein, 27 aa, Artificial Sequence
  Cyclic GFR-binding peptide
SPINILYFIGKTPKIYGKIPVGRKPKV

SEQ ID NO: 98472 - protein, 27 aa, Artificial Sequence
  Cyclic GFR-binding peptide
SATSILYYDKGVVTYLRKHRVGRKPKV

SEQ ID NO: 98473 - protein, 27 aa, Artificial Sequence
  Cyclic GFR-binding peptide
EPISILYLDSANNVVKFKYEVGRKPKV

SEQ ID NO: 98474 - protein, 27 aa, Artificial Sequence
  Cyclic GFR-binding peptide
SATSMLYYNDKQQIILRKHRVGRKPKV

SEQ ID NO: 98475 - protein, 27 aa, Artificial Sequence
  Cyclic GFR-binding peptide
EPISMLYLNDKQQIIKFKYEVGRKPKV

SEQ ID NO: 98476 - protein, 27 aa, Artificial Sequence
  Cyclic GFR-binding peptide
SPINILYFVGRKPKVYGKIPVGRKPKV

SEQ ID NO: 98477 - protein, 27 aa, Artificial Sequence
  Cyclic GFR-binding peptide
SATSILYYDSANNVVLRKHRVGRKPKV

SEQ ID NO: 98478 - protein, 27 aa, Artificial Sequence
  Cyclic GFR-binding peptide
SPISILYKDSANNVVLKYHYVGRKPKV

SEQ ID NO: 98479 - protein, 27 aa, Artificial Sequence
  Cyclic GFR-binding peptide
SPISMLYKNDKQQIILKYHYVGRKPKV

SEQ ID NO: 98480 - protein, 27 aa, Artificial Sequence
  Cyclic GFR-binding peptide
SATSILYYDAANNVVLRKHRVGRKPKV

SEQ ID NO: 98481 - protein, 27 aa, Artificial Sequence
  Cyclic GFR-binding peptide
VGRKPKVSMEGIIIQQKDNMIQMTINS

SEQ ID NO: 98482 - protein, 27 aa, Artificial Sequence
  Cyclic GFR-binding peptide
VGRKPKVSMEGLVKPKRGVMIQITINS

SEQ ID NO: 98483 - protein, 27 aa, Artificial Sequence
  Cyclic GFR-binding peptide
VGRKPKVSMEGLVVNNASDMIQITINS

SEQ ID NO: 98484 - protein, 27 aa, Artificial Sequence
  Cyclic GFR-binding peptide
VGRKPKVSMEGILLVRGNDMIQMTINS

SEQ ID NO: 98485 - protein, 27 aa, Artificial Sequence
  Cyclic GFR-binding peptide
VGRKPKVSMEGLIKPTKGIMIQITINS

SEQ ID NO: 98486 - protein, 27 aa, Artificial Sequence
  Cyclic GFR-binding peptide
VGRKPKVSMEGLIVNSSDDMIQVTINS

SEQ ID NO: 98487 - protein, 27 aa, Artificial Sequence
  Cyclic GFR-binding peptide
VGRKPKVSMEGIVVNNASDMIQITINS

SEQ ID NO: 98488 - protein, 27 aa, Artificial Sequence
  Cyclic GFR-binding peptide
VGRKPKVSMEGLVVNNAADMIQITINS

SEQ ID NO: 98489 - protein, 27 aa, Artificial Sequence
  Cyclic GFR-binding peptide
VGRKPKVSMEGLLLVRGNDMIQMTINS

SEQ ID NO: 98490 - protein, 27 aa, Artificial Sequence
  Cyclic GFR-binding peptide
VGRKPKVSMEGLIIQQKDNMIQMTINS

SEQ ID NO: 98491 - protein, 27 aa, Artificial Sequence
  Cyclic GFR-binding peptide
VGRKPKVSMEGIVVNNAADMIQITINS

SEQ ID NO: 98492 - protein, 27 aa, Artificial Sequence
  Cyclic GFR-binding peptide
VGRKPKVSMEGLVKPTRGVMIQITINS

SEQ ID NO: 98493 - protein, 27 aa, Artificial Sequence
  Cyclic GFR-binding peptide
SNITMQIMNDKQQIIIGEMSVGRKPKV

SEQ ID NO: 98494 - protein, 27 aa, Artificial Sequence
  Cyclic GFR-binding peptide
SNITIQIMVGRKPKVLGEMSVGRKPKV

SEQ ID NO: 98495 - protein, 27 aa, Artificial Sequence
  Cyclic GFR-binding peptide
SNITIQIMDSANNVVLGEMSVGRKPKV

SEQ ID NO: 98496 - protein, 27 aa, Artificial Sequence
  Cyclic GFR-binding peptide
SNITMQIMDNGRVLLIGEMSVGRKPKV

SEQ ID NO: 98497 - protein, 27 aa, Artificial Sequence
  Cyclic GFR-binding peptide
SNITIQIMIGKTPKILGEMSVGRKPKV

SEQ ID NO: 98498 - protein, 27 aa, Artificial Sequence
  Cyclic GFR-binding peptide
SNITVQIMDDSSNVILGEMSVGRKPKV

SEQ ID NO: 98499 - protein, 27 aa, Artificial Sequence
  Cyclic GFR-binding peptide
SNITIQIMDSANNVVIGEMSVGRKPKV

SEQ ID NO: 98500 - protein, 27 aa, Artificial Sequence
  Cyclic GFR-binding peptide
SNITIQIMDAANNVVLGEMSVGRKPKV

SEQ ID NO: 98501 - protein, 27 aa, Artificial Sequence
  Cyclic GFR-binding peptide
SNITMQIMDNGRVLLLGEMSVGRKPKV

SEQ ID NO: 98502 - protein, 27 aa, Artificial Sequence
  Cyclic GFR-binding peptide
SNITMQIMNDKQQIILGEMSVGRKPKV

SEQ ID NO: 98503 - protein, 27 aa, Artificial Sequence
  Cyclic GFR-binding peptide
SNITIQIMDAANNVVIGEMSVGRKPKV

SEQ ID NO: 98504 - protein, 27 aa, Artificial Sequence
  Cyclic GFR-binding peptide
SNITIQIMVGRTPKVLGEMSVGRKPKV

SEQ ID NO: 98505 - protein, 27 aa, Artificial Sequence
  Cyclic GFR-binding peptide
VGRKPKVQYNKLVVNKNEDLYLISIAS

SEQ ID NO: 98506 - protein, 27 aa, Artificial Sequence
  Cyclic GFR-binding peptide
VGRKPKVQYNKLVVNNAADLYLISIAS

SEQ ID NO: 98507 - protein, 27 aa, Artificial Sequence
  Cyclic GFR-binding peptide
VGRKPKVQYNKLIIQQKDNLYLMSIAS

SEQ ID NO: 98508 - protein, 27 aa, Artificial Sequence
  Cyclic GFR-binding peptide
VGRKPKVQYNKLLLVRGNDLYLMSIAS

SEQ ID NO: 98509 - protein, 27 aa, Artificial Sequence
  Cyclic GFR-binding peptide
VGRKPKVQYNKLYTVVGKDLYLISIAS

SEQ ID NO: 98510 - protein, 27 aa, Artificial Sequence
  Cyclic GFR-binding peptide
SAISILYLDENKNVVLKNYQVGRKPKV

SEQ ID NO: 98511 - protein, 27 aa, Artificial Sequence
  Cyclic GFR-binding peptide
SAISILYLDAANNVVLKNYQVGRKPKV

SEQ ID NO: 98512 - protein, 27 aa, Artificial Sequence
  Cyclic GFR-binding peptide
SAISMLYLNDKQQIILKNYQVGRKPKV

SEQ ID NO: 98513 - protein, 27 aa, Artificial Sequence
  Cyclic GFR-binding peptide
SAISMLYLDNGRVLLLKNYQVGRKPKV

SEQ ID NO: 98514 - protein, 27 aa, Artificial Sequence
  Cyclic GFR-binding peptide
SAISILYLDKGVVTYLKNYQVGRKPKV

SEQ ID NO: 98515 - protein, 27 aa, Artificial Sequence
  Cyclic GFR-binding peptide
IGKTPKIRYKKLIKPTKGIFYLISIAN

SEQ ID NO: 98516 - protein, 29 aa, Artificial Sequence
  Cyclic GFR-binding peptide
IGKTPKIRHKRLFIPKKRVIEYYLVSTAS

SEQ ID NO: 98517 - protein, 27 aa, Artificial Sequence
  Cyclic GFR-binding peptide
IGKTPKIYHYKLVVKDYEDKYLMSIPS

SEQ ID NO: 98518 - protein, 27 aa, Artificial Sequence
  Cyclic GFR-binding peptide
IGKTPKIQYNKLIVNNSSDLYLVSIAS

SEQ ID NO: 98519 - protein, 27 aa, Artificial Sequence
  Cyclic GFR-binding peptide
IGKTPKIRYKKLVVKDYEDFYLMSIAN

SEQ ID NO: 98520 - protein, 27 aa, Artificial Sequence
  Cyclic GFR-binding peptide
IGKTPKIRYKKLVKPTRGVFYLISIAN

SEQ ID NO: 98521 - protein, 27 aa, Artificial Sequence
  Cyclic GFR-binding peptide
IGKTPKIRHKRLVVKENEDYYLMSTAS

SEQ ID NO: 98522 - protein, 27 aa, Artificial Sequence
  Cyclic GFR-binding peptide
IGKTPKIYHYKLIKPTKGIKYLISIPS

SEQ ID NO: 98523 - protein, 29 aa, Artificial Sequence
  Cyclic GFR-binding peptide
IGKTPKIRYKKLFIPKKRVIEFYLVSIAN

SEQ ID NO: 98524 - protein, 27 aa, Artificial Sequence
  Cyclic GFR-binding peptide
IGKTPKIYHYKLVVKENEDKYLMSIPS

SEQ ID NO: 98525 - protein, 27 aa, Artificial Sequence
  Cyclic GFR-binding peptide
IGKTPKIRHKRLVKPKRGVYYLISTAS

SEQ ID NO: 98526 - protein, 27 aa, Artificial Sequence
  Cyclic GFR-binding peptide
IGKTPKIYHYKLVKPKRGVKYLISIPS

SEQ ID NO: 98527 - protein, 29 aa, Artificial Sequence
  Cyclic GFR-binding peptide
IGKTPKIQYNKLFIPKKRVIELYLVSIAS

SEQ ID NO: 98528 - protein, 27 aa, Artificial Sequence
  Cyclic GFR-binding peptide
IGKTPKIQYNKLVKPTRGVLYLISIAS

SEQ ID NO: 98529 - protein, 27 aa, Artificial Sequence
  Cyclic GFR-binding peptide
IGKTPKIRYKKLVVKENEDFYLMSIAN

SEQ ID NO: 98530 - protein, 27 aa, Artificial Sequence
  Cyclic GFR-binding peptide
IGKTPKIQYNKLTPVGMDDLYLVSIAS

SEQ ID NO: 98531 - protein, 27 aa, Artificial Sequence
  Cyclic GFR-binding peptide
IGKTPKIRYKKLTPVGMDDFYLVSIAN

SEQ ID NO: 98532 - protein, 27 aa, Artificial Sequence
  Cyclic GFR-binding peptide
IGKTPKIRYKKLVKPKRGVFYLISIAN

SEQ ID NO: 98533 - protein, 27 aa, Artificial Sequence
  Cyclic GFR-binding peptide
IGKTPKIQYNKLVVKENEDLYLMSIAS

SEQ ID NO: 98534 - protein, 27 aa, Artificial Sequence
  Cyclic GFR-binding peptide
IGKTPKIYHYKLIVNSSDDKYLVSIPS

SEQ ID NO: 98535 - protein, 27 aa, Artificial Sequence
  Cyclic GFR-binding peptide
IGKTPKIQYNKLVKPKRGVLYLISIAS

SEQ ID NO: 98536 - protein, 27 aa, Artificial Sequence
  Cyclic GFR-binding peptide
IGKTPKIRYKKLIVNNSSDFYLVSIAN

SEQ ID NO: 98537 - protein, 27 aa, Artificial Sequence
  Cyclic GFR-binding peptide
IGKTPKIRYKKLIVNSSDDFYLVSIAN

SEQ ID NO: 98538 - protein, 27 aa, Artificial Sequence
  Cyclic GFR-binding peptide
IGKTPKIRHKRLVKPTRGVYYLISTAS

SEQ ID NO: 98539 - protein, 29 aa, Artificial Sequence
  Cyclic GFR-binding peptide
IGKTPKIYHYKLFIPKKRVIEKYLVSIPS

SEQ ID NO: 98540 - protein, 27 aa, Artificial Sequence
  Cyclic GFR-binding peptide
IGKTPKIRHKRLIKPTKGIYYLISTAS

SEQ ID NO: 98541 - protein, 27 aa, Artificial Sequence
  Cyclic GFR-binding peptide
IGKTPKIRHKRLTPVGMDDYYLVSTAS

SEQ ID NO: 98542 - protein, 27 aa, Artificial Sequence
  Cyclic GFR-binding peptide
IGKTPKIYHYKLTPVGMDDKYLVSIPS

SEQ ID NO: 98543 - protein, 27 aa, Artificial Sequence
  Cyclic GFR-binding peptide
IGKTPKIYHYKLIVNNSSDKYLVSIPS

SEQ ID NO: 98544 - protein, 27 aa, Artificial Sequence
  Cyclic GFR-binding peptide
IGKTPKIRHKRLIVNNSSDYYLVSTAS

SEQ ID NO: 98545 - protein, 27 aa, Artificial Sequence
  Cyclic GFR-binding peptide
IGKTPKIYHYKLVKPTRGVKYLISIPS

SEQ ID NO: 98546 - protein, 27 aa, Artificial Sequence
  Cyclic GFR-binding peptide
IGKTPKIRHKRLIVNSSDDYYLVSTAS

SEQ ID NO: 98547 - protein, 27 aa, Artificial Sequence
  Cyclic GFR-binding peptide
IGKTPKIRHKRLVVKDYEDYYLMSTAS

SEQ ID NO: 98548 - protein, 27 aa, Artificial Sequence
  Cyclic GFR-binding peptide
IGKTPKIQYNKLIKPTKGILYLISIAS

SEQ ID NO: 98549 - protein, 27 aa, Artificial Sequence
  Cyclic GFR-binding peptide
IGKTPKIQYNKLVVKDYEDLYLMSIAS

SEQ ID NO: 98550 - protein, 27 aa, Artificial Sequence
  Cyclic GFR-binding peptide
IGKTPKIQYNKLIVNSSDDLYLVSIAS

SEQ ID NO: 98551 - protein, 27 aa, Artificial Sequence
  Cyclic GFR-binding peptide
NAISILYFIGKTPKILKKYRIGKTPKI

SEQ ID NO: 98552 - protein, 29 aa, Artificial Sequence
  Cyclic GFR-binding peptide
SATSVLYYEIVRKKPIFLRKHRIGKTPKI

SEQ ID NO: 98553 - protein, 27 aa, Artificial Sequence
  Cyclic GFR-binding peptide
SPISMLYKDEYDKVVLKYHYIGKTPKI

SEQ ID NO: 98554 - protein, 27 aa, Artificial Sequence
  Cyclic GFR-binding peptide
SAISVLYLDSSNNVILKNYQIGKTPKI

SEQ ID NO: 98555 - protein, 27 aa, Artificial Sequence
  Cyclic GFR-binding peptide
NAISMLYFDEYDKVVLKKYRIGKTPKI

SEQ ID NO: 98556 - protein, 27 aa, Artificial Sequence
  Cyclic GFR-binding peptide
NAISILYFVGRTPKVLKKYRIGKTPKI

SEQ ID NO: 98557 - protein, 27 aa, Artificial Sequence
  Cyclic GFR-binding peptide
SATSMLYYDENEKVVLRKHRIGKTPKI

SEQ ID NO: 98558 - protein, 27 aa, Artificial Sequence
  Cyclic GFR-binding peptide
SPISILYKIGKTPKILKYHYIGKTPKI

SEQ ID NO: 98559 - protein, 29 aa, Artificial Sequence
  Cyclic GFR-binding peptide
NAISVLYFEIVRKKPIFLKKYRIGKTPKI

SEQ ID NO: 98560 - protein, 27 aa, Artificial Sequence
  Cyclic GFR-binding peptide
SPISMLYKDENEKVVLKYHYIGKTPKI

SEQ ID NO: 98561 - protein, 27 aa, Artificial Sequence
  Cyclic GFR-binding peptide
SATSILYYVGRKPKVLRKHRIGKTPKI

SEQ ID NO: 98562 - protein, 27 aa, Artificial Sequence
  Cyclic GFR-binding peptide
SPISILYKVGRKPKVLKYHYIGKTPKI

SEQ ID NO: 98563 - protein, 29 aa, Artificial Sequence
  Cyclic GFR-binding peptide
SAISVLYLEIVRKKPIFLKNYQIGKTPKI

SEQ ID NO: 98564 - protein, 27 aa, Artificial Sequence
  Cyclic GFR-binding peptide
SAISILYLVGRTPKVLKNYQIGKTPKI

SEQ ID NO: 98565 - protein, 27 aa, Artificial Sequence
  Cyclic GFR-binding peptide
NAISMLYFDENEKVVLKKYRIGKTPKI

SEQ ID NO: 98566 - protein, 27 aa, Artificial Sequence
  Cyclic GFR-binding peptide
SAISVLYLDDMGVPTLKNYQIGKTPKI

SEQ ID NO: 98567 - protein, 27 aa, Artificial Sequence
  Cyclic GFR-binding peptide
NAISVLYFDDMGVPTLKKYRIGKTPKI

SEQ ID NO: 98568 - protein, 27 aa, Artificial Sequence
  Cyclic GFR-binding peptide
NAISILYFVGRKPKVLKKYRIGKTPKI

SEQ ID NO: 98569 - protein, 27 aa, Artificial Sequence
  Cyclic GFR-binding peptide
SAISMLYLDENEKVVLKNYQIGKTPKI

SEQ ID NO: 98570 - protein, 27 aa, Artificial Sequence
  Cyclic GFR-binding peptide
SPISVLYKDDSSNVILKYHYIGKTPKI

SEQ ID NO: 98571 - protein, 27 aa, Artificial Sequence
  Cyclic GFR-binding peptide
SAISILYLVGRKPKVLKNYQIGKTPKI

SEQ ID NO: 98572 - protein, 27 aa, Artificial Sequence
  Cyclic GFR-binding peptide
NAISVLYFDSSNNVILKKYRIGKTPKI

SEQ ID NO: 98573 - protein, 27 aa, Artificial Sequence
  Cyclic GFR-binding peptide
NAISVLYFDDSSNVILKKYRIGKTPKI

SEQ ID NO: 98574 - protein, 27 aa, Artificial Sequence
  Cyclic GFR-binding peptide
SATSILYYVGRTPKVLRKHRIGKTPKI

SEQ ID NO: 98575 - protein, 29 aa, Artificial Sequence
  Cyclic GFR-binding peptide
SPISVLYKEIVRKKPIFLKYHYIGKTPKI

SEQ ID NO: 98576 - protein, 27 aa, Artificial Sequence
  Cyclic GFR-binding peptide
SATSILYYIGKTPKILRKHRIGKTPKI

SEQ ID NO: 98577 - protein, 27 aa, Artificial Sequence
  Cyclic GFR-binding peptide
SATSVLYYDDMGVPTLRKHRIGKTPKI

SEQ ID NO: 98578 - protein, 27 aa, Artificial Sequence
  Cyclic GFR-binding peptide
SPISVLYKDDMGVPTLKYHYIGKTPKI

SEQ ID NO: 98579 - protein, 27 aa, Artificial Sequence
  Cyclic GFR-binding peptide
SPISVLYKDSSNNVILKYHYIGKTPKI

SEQ ID NO: 98580 - protein, 27 aa, Artificial Sequence
  Cyclic GFR-binding peptide
SATSVLYYDSSNNVILRKHRIGKTPKI

SEQ ID NO: 98581 - protein, 27 aa, Artificial Sequence
  Cyclic GFR-binding peptide
SPISILYKVGRTPKVLKYHYIGKTPKI

SEQ ID NO: 98582 - protein, 27 aa, Artificial Sequence
  Cyclic GFR-binding peptide
SATSVLYYDDSSNVILRKHRIGKTPKI

SEQ ID NO: 98583 - protein, 27 aa, Artificial Sequence
  Cyclic GFR-binding peptide
SATSMLYYDEYDKVVLRKHRIGKTPKI

SEQ ID NO: 98584 - protein, 27 aa, Artificial Sequence
  Cyclic GFR-binding peptide
SAISMLYLDEYDKVVLKNYQIGKTPKI

SEQ ID NO: 98585 - protein, 27 aa, Artificial Sequence
  Cyclic GFR-binding peptide
SAISVLYLDDSSNVILKNYQIGKTPKI

SEQ ID NO: 98586 - protein, 27 aa, Artificial Sequence
  Cyclic GFR-binding peptide
IGKTPKINSLQEVVKDYEDYYLMTLPE

SEQ ID NO: 98587 - protein, 27 aa, Artificial Sequence
  Cyclic GFR-binding peptide
IGKTPKINSLQEIKPTKGIYYVIPLPE

SEQ ID NO: 98588 - protein, 27 aa, Artificial Sequence
  Cyclic GFR-binding peptide
IGKTPKINSLQEVKPKRGVYYLITLPE

SEQ ID NO: 98589 - protein, 27 aa, Artificial Sequence
  Cyclic GFR-binding peptide
IGKTPKINSLQEVKPTRGVYYVIPLPE

SEQ ID NO: 98590 - protein, 27 aa, Artificial Sequence
  Cyclic GFR-binding peptide
IGKTPKIEYQKYIVNSSDDIFLVSIPS

SEQ ID NO: 98591 - protein, 27 aa, Artificial Sequence
  Cyclic GFR-binding peptide
IGKTPKIEYQKYVKPTRGVIFLISIPS

SEQ ID NO: 98592 - protein, 27 aa, Artificial Sequence
  Cyclic GFR-binding peptide
IGKTPKINSLQEVVKENEDYYLMTLPE

SEQ ID NO: 98593 - protein, 27 aa, Artificial Sequence
  Cyclic GFR-binding peptide
IGKTPKINSLQEVVNNASDYYLITLPE

SEQ ID NO: 98594 - protein, 27 aa, Artificial Sequence
  Cyclic GFR-binding peptide
IGKTPKINSLQEVKPKRGVYYVIPLPE

SEQ ID NO: 98595 - protein, 27 aa, Artificial Sequence
  Cyclic GFR-binding peptide
IGKTPKINSLQEVVNNASDYYVIPLPE

SEQ ID NO: 98596 - protein, 27 aa, Artificial Sequence
  Cyclic GFR-binding peptide
IGKTPKINSLQEVKPTRGVYYLITLPE

SEQ ID NO: 98597 - protein, 27 aa, Artificial Sequence
  Cyclic GFR-binding peptide
IGKTPKIEYQKYIKPTKGIIFLISIPS

SEQ ID NO: 98598 - protein, 27 aa, Artificial Sequence
  Cyclic GFR-binding peptide
IGKTPKIEYQKYVVNNASDIFLISIPS

SEQ ID NO: 98599 - protein, 27 aa, Artificial Sequence
  Cyclic GFR-binding peptide
IGKTPKINSLQEIVNSSDDYYVVPLPE

SEQ ID NO: 98600 - protein, 27 aa, Artificial Sequence
  Cyclic GFR-binding peptide
IGKTPKINSLQEVVKDYEDYYVMPLPE

SEQ ID NO: 98601 - protein, 27 aa, Artificial Sequence
  Cyclic GFR-binding peptide
IGKTPKIEYQKYVVKENEDIFLMSIPS

SEQ ID NO: 98602 - protein, 27 aa, Artificial Sequence
  Cyclic GFR-binding peptide
IGKTPKINSLQEVVKENEDYYVMPLPE

SEQ ID NO: 98603 - protein, 27 aa, Artificial Sequence
  Cyclic GFR-binding peptide
IGKTPKIEYQKYVVKDYEDIFLMSIPS

SEQ ID NO: 98604 - protein, 27 aa, Artificial Sequence
  Cyclic GFR-binding peptide
IGKTPKIQYNKLVVNNASDLYLISIAS

SEQ ID NO: 98605 - protein, 27 aa, Artificial Sequence
  Cyclic GFR-binding peptide
IGKTPKINSLQEIKPTKGIYYLITLPE

SEQ ID NO: 98606 - protein, 27 aa, Artificial Sequence
  Cyclic GFR-binding peptide
IGKTPKIEYQKYVKPKRGVIFLISIPS

SEQ ID NO: 98607 - protein, 27 aa, Artificial Sequence
  Cyclic GFR-binding peptide
IGKTPKIRYKKLVVNNASDFYLISIAN

SEQ ID NO: 98608 - protein, 27 aa, Artificial Sequence
  Cyclic GFR-binding peptide
IGKTPKINSLQEIVNSSDDYYLVTLPE

SEQ ID NO: 98609 - protein, 27 aa, Artificial Sequence
  Cyclic GFR-binding peptide
EPLTMLYYDEYDKVVEQLSNIGKTPKI

SEQ ID NO: 98610 - protein, 27 aa, Artificial Sequence
  Cyclic GFR-binding peptide
EPLPIVYYIGKTPKIEQLSNIGKTPKI

SEQ ID NO: 98611 - protein, 27 aa, Artificial Sequence
  Cyclic GFR-binding peptide
EPLTILYYVGRKPKVEQLSNIGKTPKI

SEQ ID NO: 98612 - protein, 27 aa, Artificial Sequence
  Cyclic GFR-binding peptide
EPLPIVYYVGRTPKVEQLSNIGKTPKI

SEQ ID NO: 98613 - protein, 27 aa, Artificial Sequence
  Cyclic GFR-binding peptide
SPISVLFIDDSSNVIYKQYEIGKTPKI

SEQ ID NO: 98614 - protein, 27 aa, Artificial Sequence
  Cyclic GFR-binding peptide
SPISILFIVGRTPKVYKQYEIGKTPKI

SEQ ID NO: 98615 - protein, 27 aa, Artificial Sequence
  Cyclic GFR-binding peptide
EPLTMLYYDENEKVVEQLSNIGKTPKI

SEQ ID NO: 98616 - protein, 27 aa, Artificial Sequence
  Cyclic GFR-binding peptide
EPLTILYYDSANNVVEQLSNIGKTPKI

SEQ ID NO: 98617 - protein, 27 aa, Artificial Sequence
  Cyclic GFR-binding peptide
EPLPIVYYVGRKPKVEQLSNIGKTPKI

SEQ ID NO: 98618 - protein, 27 aa, Artificial Sequence
  Cyclic GFR-binding peptide
EPLPIVYYDSANNVVEQLSNIGKTPKI

SEQ ID NO: 98619 - protein, 27 aa, Artificial Sequence
  Cyclic GFR-binding peptide
EPLTILYYVGRTPKVEQLSNIGKTPKI

SEQ ID NO: 98620 - protein, 27 aa, Artificial Sequence
  Cyclic GFR-binding peptide
SPISILFIIGKTPKIYKQYEIGKTPKI

SEQ ID NO: 98621 - protein, 27 aa, Artificial Sequence
  Cyclic GFR-binding peptide
SPISILFIDSANNVVYKQYEIGKTPKI

SEQ ID NO: 98622 - protein, 27 aa, Artificial Sequence
  Cyclic GFR-binding peptide
EPLPVVYYDDSSNVIEQLSNIGKTPKI

SEQ ID NO: 98623 - protein, 27 aa, Artificial Sequence
  Cyclic GFR-binding peptide
EPLPMVYYDEYDKVVEQLSNIGKTPKI

SEQ ID NO: 98624 - protein, 27 aa, Artificial Sequence
  Cyclic GFR-binding peptide
SPISMLFIDENEKVVYKQYEIGKTPKI

SEQ ID NO: 98625 - protein, 27 aa, Artificial Sequence
  Cyclic GFR-binding peptide
EPLPMVYYDENEKVVEQLSNIGKTPKI

SEQ ID NO: 98626 - protein, 27 aa, Artificial Sequence
  Cyclic GFR-binding peptide
SPISMLFIDEYDKVVYKQYEIGKTPKI

SEQ ID NO: 98627 - protein, 27 aa, Artificial Sequence
  Cyclic GFR-binding peptide
SAISILYLDSANNVVLKNYQIGKTPKI

SEQ ID NO: 98628 - protein, 27 aa, Artificial Sequence
  Cyclic GFR-binding peptide
EPLTILYYIGKTPKIEQLSNIGKTPKI

SEQ ID NO: 98629 - protein, 27 aa, Artificial Sequence
  Cyclic GFR-binding peptide
SPISILFIVGRKPKVYKQYEIGKTPKI

SEQ ID NO: 98630 - protein, 27 aa, Artificial Sequence
  Cyclic GFR-binding peptide
NAISILYFDSANNVVLKKYRIGKTPKI

SEQ ID NO: 98631 - protein, 27 aa, Artificial Sequence
  Cyclic GFR-binding peptide
EPLTVLYYDDSSNVIEQLSNIGKTPKI

SEQ ID NO: 98632 - protein, 29 aa, Artificial Sequence
  Cyclic GFR-binding peptide
IGKTPKIVTAKKLKPKKRVYEIKRVQVPR

SEQ ID NO: 98633 - protein, 29 aa, Artificial Sequence
  Cyclic GFR-binding peptide
IGKTPKIVQVEKLKPKKRVYEVKAVKVSR

SEQ ID NO: 98634 - protein, 29 aa, Artificial Sequence
  Cyclic GFR-binding peptide
IGKTPKIVQVEKFIPKKRVIEVKAVKVSR

SEQ ID NO: 98635 - protein, 29 aa, Artificial Sequence
  Cyclic GFR-binding peptide
IGKTPKIVQVEKHQGQHPKIRVKAMKVSR

SEQ ID NO: 98636 - protein, 29 aa, Artificial Sequence
  Cyclic GFR-binding peptide
IGKTPKIVTAKKHQGQHPKIRIKRMQVPR

SEQ ID NO: 98637 - protein, 29 aa, Artificial Sequence
  Cyclic GFR-binding peptide
IGKTPKISMEGLLKPKKRVYEMIQVTINS

SEQ ID NO: 98638 - protein, 29 aa, Artificial Sequence
  Cyclic GFR-binding peptide
IGKTPKISMEGIFIPKKRVIEMIQVTINS

SEQ ID NO: 98639 - protein, 29 aa, Artificial Sequence
  Cyclic GFR-binding peptide
IGKTPKISMEGLHQGQHPKIRMIQMTINS

SEQ ID NO: 98640 - protein, 29 aa, Artificial Sequence
  Cyclic GFR-binding peptide
IGKTPKISMEGILKPKKRVYEMIQVTINS

SEQ ID NO: 98641 - protein, 29 aa, Artificial Sequence
  Cyclic GFR-binding peptide
IGKTPKISMEGLFIPKKRVIEMIQVTINS

SEQ ID NO: 98642 - protein, 29 aa, Artificial Sequence
  Cyclic GFR-binding peptide
IGKTPKIVTAKKFIPKKRVIEIKRVQVPR

SEQ ID NO: 98643 - protein, 29 aa, Artificial Sequence
  Cyclic GFR-binding peptide
IGKTPKISMEGIHQGQHPKIRMIQMTINS

SEQ ID NO: 98644 - protein, 29 aa, Artificial Sequence
  Cyclic GFR-binding peptide
RPVQVRKIEYVRKKPKLKKATVIGKTPKI

SEQ ID NO: 98645 - protein, 29 aa, Artificial Sequence
  Cyclic GFR-binding peptide
RSVKVAKVEYVRKKPKLKEVQVIGKTPKI

SEQ ID NO: 98646 - protein, 29 aa, Artificial Sequence
  Cyclic GFR-binding peptide
RSVKVAKVEIVRKKPIFKEVQVIGKTPKI

SEQ ID NO: 98647 - protein, 29 aa, Artificial Sequence
  Cyclic GFR-binding peptide
RSVKMAKVRIKPHQGQHKEVQVIGKTPKI

SEQ ID NO: 98648 - protein, 29 aa, Artificial Sequence
  Cyclic GFR-binding peptide
RPVQMRKIRIKPHQGQHKKATVIGKTPKI

SEQ ID NO: 98649 - protein, 29 aa, Artificial Sequence
  Cyclic GFR-binding peptide
SNITVQIMEYVRKKPKLLGEMSIGKTPKI

SEQ ID NO: 98650 - protein, 29 aa, Artificial Sequence
  Cyclic GFR-binding peptide
SNITVQIMEIVRKKPIFIGEMSIGKTPKI

SEQ ID NO: 98651 - protein, 29 aa, Artificial Sequence
  Cyclic GFR-binding peptide
SNITMQIMRIKPHQGQHLGEMSIGKTPKI

SEQ ID NO: 98652 - protein, 29 aa, Artificial Sequence
  Cyclic GFR-binding peptide
SNITVQIMEYVRKKPKLIGEMSIGKTPKI

SEQ ID NO: 98653 - protein, 29 aa, Artificial Sequence
  Cyclic GFR-binding peptide
SNITVQIMEIVRKKPIFLGEMSIGKTPKI

SEQ ID NO: 98654 - protein, 29 aa, Artificial Sequence
  Cyclic GFR-binding peptide
RPVQVRKIEIVRKKPIFKKATVIGKTPKI

SEQ ID NO: 98655 - protein, 29 aa, Artificial Sequence
  Cyclic GFR-binding peptide
SNITMQIMRIKPHQGQHIGEMSIGKTPKI

SEQ ID NO: 98656 - protein, 27 aa, Artificial Sequence
  Cyclic GFR-binding peptide
IGKTPKIEYKFKVKPTRGVLYLISIPE

SEQ ID NO: 98657 - protein, 27 aa, Artificial Sequence
  Cyclic GFR-binding peptide
IGKTPKIEYKFKTPVGMDDLYLVSIPE

SEQ ID NO: 98658 - protein, 27 aa, Artificial Sequence
  Cyclic GFR-binding peptide
IGKTPKIEYQKYVKPKRGVIYLISIPS

SEQ ID NO: 98659 - protein, 27 aa, Artificial Sequence
  Cyclic GFR-binding peptide
IGKTPKIEYQKYVVKDYEDIYLMSIPS

SEQ ID NO: 98660 - protein, 27 aa, Artificial Sequence
  Cyclic GFR-binding peptide
IGKTPKIEYKFKIKPTKGILYLISIPE

SEQ ID NO: 98661 - protein, 27 aa, Artificial Sequence
  Cyclic GFR-binding peptide
IGKTPKIYHYKLYTVVGKDKYLISIPS

SEQ ID NO: 98662 - protein, 27 aa, Artificial Sequence
  Cyclic GFR-binding peptide
IGKTPKIRYKKLYTVVGKDFYLISIAN

SEQ ID NO: 98663 - protein, 27 aa, Artificial Sequence
  Cyclic GFR-binding peptide
IGKTPKIEYQKYVVNNAADIYLISIPS

SEQ ID NO: 98664 - protein, 27 aa, Artificial Sequence
  Cyclic GFR-binding peptide
IGKTPKIEYQKYVKPTRGVIYLISIPS

SEQ ID NO: 98665 - protein, 27 aa, Artificial Sequence
  Cyclic GFR-binding peptide
IGKTPKIEYQKYTPVGMDDIYLVSIPS

SEQ ID NO: 98666 - protein, 27 aa, Artificial Sequence
  Cyclic GFR-binding peptide
IGKTPKIEYKFKVVKDYEDLYLMSIPE

SEQ ID NO: 98667 - protein, 27 aa, Artificial Sequence
  Cyclic GFR-binding peptide
IGKTPKIEYKFKVVNNAADLYLISIPE

SEQ ID NO: 98668 - protein, 27 aa, Artificial Sequence
  Cyclic GFR-binding peptide
IGKTPKIEYQKYVVKENEDIYLMSIPS

SEQ ID NO: 98669 - protein, 27 aa, Artificial Sequence
  Cyclic GFR-binding peptide
IGKTPKIEYQKYIKPTKGIIYLISIPS

SEQ ID NO: 98670 - protein, 27 aa, Artificial Sequence
  Cyclic GFR-binding peptide
IGKTPKIRYKKLVVNNAADFYLISIAN

SEQ ID NO: 98671 - protein, 27 aa, Artificial Sequence
  Cyclic GFR-binding peptide
IGKTPKIYHYKLVVNNAADKYLISIPS

SEQ ID NO: 98672 - protein, 27 aa, Artificial Sequence
  Cyclic GFR-binding peptide
IGKTPKIEYKFKIVNNSSDLYLVSIPE

SEQ ID NO: 98673 - protein, 27 aa, Artificial Sequence
  Cyclic GFR-binding peptide
IGKTPKIEYQKYIVNSSDDIYLVSIPS

SEQ ID NO: 98674 - protein, 27 aa, Artificial Sequence
  Cyclic GFR-binding peptide
IGKTPKIEYKFKIVNSSDDLYLVSIPE

SEQ ID NO: 98675 - protein, 27 aa, Artificial Sequence
  Cyclic GFR-binding peptide
IGKTPKIEYKFKVKPKRGVLYLISIPE

SEQ ID NO: 98676 - protein, 27 aa, Artificial Sequence
  Cyclic GFR-binding peptide
IGKTPKIEYQKYYTVVGKDIYLISIPS

SEQ ID NO: 98677 - protein, 27 aa, Artificial Sequence
  Cyclic GFR-binding peptide
IGKTPKIEYKFKVVKENEDLYLMSIPE

SEQ ID NO: 98678 - protein, 27 aa, Artificial Sequence
  Cyclic GFR-binding peptide
IGKTPKIEYQKYIVNNSSDIYLVSIPS

SEQ ID NO: 98679 - protein, 27 aa, Artificial Sequence
  Cyclic GFR-binding peptide
IGKTPKIEYKFKYTVVGKDLYLISIPE

SEQ ID NO: 98680 - protein, 27 aa, Artificial Sequence
  Cyclic GFR-binding peptide
EPISILYLVGRTPKVKFKYEIGKTPKI

SEQ ID NO: 98681 - protein, 27 aa, Artificial Sequence
  Cyclic GFR-binding peptide
EPISVLYLDDMGVPTKFKYEIGKTPKI

SEQ ID NO: 98682 - protein, 27 aa, Artificial Sequence
  Cyclic GFR-binding peptide
SPISILYIVGRKPKVYKQYEIGKTPKI

SEQ ID NO: 98683 - protein, 27 aa, Artificial Sequence
  Cyclic GFR-binding peptide
SPISMLYIDEYDKVVYKQYEIGKTPKI

SEQ ID NO: 98684 - protein, 27 aa, Artificial Sequence
  Cyclic GFR-binding peptide
EPISILYLIGKTPKIKFKYEIGKTPKI

SEQ ID NO: 98685 - protein, 27 aa, Artificial Sequence
  Cyclic GFR-binding peptide
SPISILYKDKGVVTYLKYHYIGKTPKI

SEQ ID NO: 98686 - protein, 27 aa, Artificial Sequence
  Cyclic GFR-binding peptide
NAISILYFDKGVVTYLKKYRIGKTPKI

SEQ ID NO: 98687 - protein, 27 aa, Artificial Sequence
  Cyclic GFR-binding peptide
SPISILYIDAANNVVYKQYEIGKTPKI

SEQ ID NO: 98688 - protein, 27 aa, Artificial Sequence
  Cyclic GFR-binding peptide
SPISILYIVGRTPKVYKQYEIGKTPKI

SEQ ID NO: 98689 - protein, 27 aa, Artificial Sequence
  Cyclic GFR-binding peptide
SPISVLYIDDMGVPTYKQYEIGKTPKI

SEQ ID NO: 98690 - protein, 27 aa, Artificial Sequence
  Cyclic GFR-binding peptide
EPISMLYLDEYDKVVKFKYEIGKTPKI

SEQ ID NO: 98691 - protein, 27 aa, Artificial Sequence
  Cyclic GFR-binding peptide
EPISILYLDAANNVVKFKYEIGKTPKI

SEQ ID NO: 98692 - protein, 27 aa, Artificial Sequence
  Cyclic GFR-binding peptide
SPISMLYIDENEKVVYKQYEIGKTPKI

SEQ ID NO: 98693 - protein, 27 aa, Artificial Sequence
  Cyclic GFR-binding peptide
SPISILYIIGKTPKIYKQYEIGKTPKI

SEQ ID NO: 98694 - protein, 27 aa, Artificial Sequence
  Cyclic GFR-binding peptide
NAISILYFDAANNVVLKKYRIGKTPKI

SEQ ID NO: 98695 - protein, 27 aa, Artificial Sequence
  Cyclic GFR-binding peptide
SPISILYKDAANNVVLKYHYIGKTPKI

SEQ ID NO: 98696 - protein, 27 aa, Artificial Sequence
  Cyclic GFR-binding peptide
EPISVLYLDSSNNVIKFKYEIGKTPKI

SEQ ID NO: 98697 - protein, 27 aa, Artificial Sequence
  Cyclic GFR-binding peptide
SPISVLYIDDSSNVIYKQYEIGKTPKI

SEQ ID NO: 98698 - protein, 27 aa, Artificial Sequence
  Cyclic GFR-binding peptide
EPISVLYLDDSSNVIKFKYEIGKTPKI

SEQ ID NO: 98699 - protein, 27 aa, Artificial Sequence
  Cyclic GFR-binding peptide
EPISILYLVGRKPKVKFKYEIGKTPKI

SEQ ID NO: 98700 - protein, 27 aa, Artificial Sequence
  Cyclic GFR-binding peptide
SPISILYIDKGVVTYYKQYEIGKTPKI

SEQ ID NO: 98701 - protein, 27 aa, Artificial Sequence
  Cyclic GFR-binding peptide
EPISMLYLDENEKVVKFKYEIGKTPKI

SEQ ID NO: 98702 - protein, 27 aa, Artificial Sequence
  Cyclic GFR-binding peptide
SPISVLYIDSSNNVIYKQYEIGKTPKI

SEQ ID NO: 98703 - protein, 27 aa, Artificial Sequence
  Cyclic GFR-binding peptide
EPISILYLDKGVVTYKFKYEIGKTPKI

SEQ ID NO: 98704 - protein, 27 aa, Artificial Sequence
  Cyclic GFR-binding peptide
IGKTPKIPIKGYIIQQKDNFYLMNIPS

SEQ ID NO: 98705 - protein, 27 aa, Artificial Sequence
  Cyclic GFR-binding peptide
IGKTPKIPIKGYVVKDYEDFYLMNIPS

SEQ ID NO: 98706 - protein, 27 aa, Artificial Sequence
  Cyclic GFR-binding peptide
IGKTPKIPIKGYIVNSSDDFYLVNIPS

SEQ ID NO: 98707 - protein, 27 aa, Artificial Sequence
  Cyclic GFR-binding peptide
IGKTPKIPIKGYVVNNAADFYLINIPS

SEQ ID NO: 98708 - protein, 27 aa, Artificial Sequence
  Cyclic GFR-binding peptide
IGKTPKIPIKGYYTVVGKDFYLINIPS

SEQ ID NO: 98709 - protein, 27 aa, Artificial Sequence
  Cyclic GFR-binding peptide
IGKTPKIPIKGYLLVRGNDFYLMNIPS

SEQ ID NO: 98710 - protein, 27 aa, Artificial Sequence
  Cyclic GFR-binding peptide
IGKTPKIPIKGYVVKENEDFYLMNIPS

SEQ ID NO: 98711 - protein, 27 aa, Artificial Sequence
  Cyclic GFR-binding peptide
IGKTPKIPIKGYVVNNASDFYLINIPS

SEQ ID NO: 98712 - protein, 27 aa, Artificial Sequence
  Cyclic GFR-binding peptide
IGKTPKIPIKGYTPVGMDDFYLVNIPS

SEQ ID NO: 98713 - protein, 27 aa, Artificial Sequence
  Cyclic GFR-binding peptide
IGKTPKIPIKGYIVNNSSDFYLVNIPS

SEQ ID NO: 98714 - protein, 27 aa, Artificial Sequence
  Cyclic GFR-binding peptide
SPINMLYFNDKQQIIYGKIPIGKTPKI

SEQ ID NO: 98715 - protein, 27 aa, Artificial Sequence
  Cyclic GFR-binding peptide
SPINMLYFDEYDKVVYGKIPIGKTPKI

SEQ ID NO: 98716 - protein, 27 aa, Artificial Sequence
  Cyclic GFR-binding peptide
SPINVLYFDDSSNVIYGKIPIGKTPKI

SEQ ID NO: 98717 - protein, 27 aa, Artificial Sequence
  Cyclic GFR-binding peptide
SPINILYFDAANNVVYGKIPIGKTPKI

SEQ ID NO: 98718 - protein, 27 aa, Artificial Sequence
  Cyclic GFR-binding peptide
SPINILYFDKGVVTYYGKIPIGKTPKI

SEQ ID NO: 98719 - protein, 27 aa, Artificial Sequence
  Cyclic GFR-binding peptide
SPINMLYFDNGRVLLYGKIPIGKTPKI

SEQ ID NO: 98720 - protein, 27 aa, Artificial Sequence
  Cyclic GFR-binding peptide
SPINMLYFDENEKVVYGKIPIGKTPKI

SEQ ID NO: 98721 - protein, 27 aa, Artificial Sequence
  Cyclic GFR-binding peptide
SPINILYFDSANNVVYGKIPIGKTPKI

SEQ ID NO: 98722 - protein, 27 aa, Artificial Sequence
  Cyclic GFR-binding peptide
SPINVLYFDDMGVPTYGKIPIGKTPKI

SEQ ID NO: 98723 - protein, 27 aa, Artificial Sequence
  Cyclic GFR-binding peptide
SPINVLYFDSSNNVIYGKIPIGKTPKI

SEQ ID NO: 98724 - protein, 27 aa, Artificial Sequence
  Cyclic GFR-binding peptide
IGKTPKIEYQKYVVNNASDIYLISIPS

SEQ ID NO: 98725 - protein, 27 aa, Artificial Sequence
  Cyclic GFR-binding peptide
IGKTPKIEYQKYIIQQKDNIYLMSIPS

SEQ ID NO: 98726 - protein, 27 aa, Artificial Sequence
  Cyclic GFR-binding peptide
IGKTPKIEYQKYLLVRGNDIYLMSIPS

SEQ ID NO: 98727 - protein, 27 aa, Artificial Sequence
  Cyclic GFR-binding peptide
SPISILYIDSANNVVYKQYEIGKTPKI

SEQ ID NO: 98728 - protein, 27 aa, Artificial Sequence
  Cyclic GFR-binding peptide
SPISMLYINDKQQIIYKQYEIGKTPKI

SEQ ID NO: 98729 - protein, 27 aa, Artificial Sequence
  Cyclic GFR-binding peptide
SPISMLYIDNGRVLLYKQYEIGKTPKI

SEQ ID NO: 98730 - protein, 27 aa, Artificial Sequence
  Cyclic GFR-binding peptide
IGKTPKIPYVKLYTVVGKDFFLISLSS

SEQ ID NO: 98731 - protein, 27 aa, Artificial Sequence
  Cyclic GFR-binding peptide
IGKTPKIPYVKLIKPTKGIFFLISLSS

SEQ ID NO: 98732 - protein, 27 aa, Artificial Sequence
  Cyclic GFR-binding peptide
IGKTPKIPYVKLIIQQKDNFFLMSLSS

SEQ ID NO: 98733 - protein, 27 aa, Artificial Sequence
  Cyclic GFR-binding peptide
IGKTPKIPYVKLIVNSSDDFFLVSLSS

SEQ ID NO: 98734 - protein, 27 aa, Artificial Sequence
  Cyclic GFR-binding peptide
IGKTPKIPYVKLVKPKRGVFFLISLSS

SEQ ID NO: 98735 - protein, 27 aa, Artificial Sequence
  Cyclic GFR-binding peptide
IGKTPKIPYVKLVKPTRGVFFLISLSS

SEQ ID NO: 98736 - protein, 27 aa, Artificial Sequence
  Cyclic GFR-binding peptide
IGKTPKIPYVKLTPVGMDDFFLVSLSS

SEQ ID NO: 98737 - protein, 29 aa, Artificial Sequence
  Cyclic GFR-binding peptide
IGKTPKIPYVKLHQGQHPKIRFFLMSLSS

SEQ ID NO: 98738 - protein, 27 aa, Artificial Sequence
  Cyclic GFR-binding peptide
IGKTPKIPYVKLVVNKNEDFFLISLSS

SEQ ID NO: 98739 - protein, 27 aa, Artificial Sequence
  Cyclic GFR-binding peptide
IGKTPKIPYVKLVVNNASDFFLISLSS

SEQ ID NO: 98740 - protein, 27 aa, Artificial Sequence
  Cyclic GFR-binding peptide
IGKTPKIPYVKLVVKENEDFFLMSLSS

SEQ ID NO: 98741 - protein, 27 aa, Artificial Sequence
  Cyclic GFR-binding peptide
IGKTPKIPYVKLIVNNSSDFFLVSLSS

SEQ ID NO: 98742 - protein, 29 aa, Artificial Sequence
  Cyclic GFR-binding peptide
IGKTPKIPYVKLLKPKKRVYEFFLVSLSS

SEQ ID NO: 98743 - protein, 27 aa, Artificial Sequence
  Cyclic GFR-binding peptide
IGKTPKIPYVKLLLVRGNDFFLMSLSS

SEQ ID NO: 98744 - protein, 27 aa, Artificial Sequence
  Cyclic GFR-binding peptide
IGKTPKIPYVKLVVKDYEDFFLMSLSS

SEQ ID NO: 98745 - protein, 27 aa, Artificial Sequence
  Cyclic GFR-binding peptide
IGKTPKIPYVKLVVNNAADFFLISLSS

SEQ ID NO: 98746 - protein, 27 aa, Artificial Sequence
  Cyclic GFR-binding peptide
SSLSILFFDKGVVTYLKVYPIGKTPKI

SEQ ID NO: 98747 - protein, 27 aa, Artificial Sequence
  Cyclic GFR-binding peptide
SSLSILFFIGKTPKILKVYPIGKTPKI

SEQ ID NO: 98748 - protein, 27 aa, Artificial Sequence
  Cyclic GFR-binding peptide
SSLSMLFFNDKQQIILKVYPIGKTPKI

SEQ ID NO: 98749 - protein, 27 aa, Artificial Sequence
  Cyclic GFR-binding peptide
SSLSVLFFDDSSNVILKVYPIGKTPKI

SEQ ID NO: 98750 - protein, 27 aa, Artificial Sequence
  Cyclic GFR-binding peptide
SSLSILFFVGRKPKVLKVYPIGKTPKI

SEQ ID NO: 98751 - protein, 27 aa, Artificial Sequence
  Cyclic GFR-binding peptide
SSLSILFFVGRTPKVLKVYPIGKTPKI

SEQ ID NO: 98752 - protein, 27 aa, Artificial Sequence
  Cyclic GFR-binding peptide
SSLSVLFFDDMGVPTLKVYPIGKTPKI

SEQ ID NO: 98753 - protein, 29 aa, Artificial Sequence
  Cyclic GFR-binding peptide
SSLSMLFFRIKPHQGQHLKVYPIGKTPKI

SEQ ID NO: 98754 - protein, 27 aa, Artificial Sequence
  Cyclic GFR-binding peptide
SSLSILFFDENKNVVLKVYPIGKTPKI

SEQ ID NO: 98755 - protein, 27 aa, Artificial Sequence
  Cyclic GFR-binding peptide
SSLSILFFDSANNVVLKVYPIGKTPKI

SEQ ID NO: 98756 - protein, 27 aa, Artificial Sequence
  Cyclic GFR-binding peptide
SSLSMLFFDENEKVVLKVYPIGKTPKI

SEQ ID NO: 98757 - protein, 27 aa, Artificial Sequence
  Cyclic GFR-binding peptide
SSLSVLFFDSSNNVILKVYPIGKTPKI

SEQ ID NO: 98758 - protein, 29 aa, Artificial Sequence
  Cyclic GFR-binding peptide
SSLSVLFFEYVRKKPKLLKVYPIGKTPKI

SEQ ID NO: 98759 - protein, 27 aa, Artificial Sequence
  Cyclic GFR-binding peptide
SSLSMLFFDNGRVLLLKVYPIGKTPKI

SEQ ID NO: 98760 - protein, 27 aa, Artificial Sequence
  Cyclic GFR-binding peptide
SSLSMLFFDEYDKVVLKVYPIGKTPKI

SEQ ID NO: 98761 - protein, 27 aa, Artificial Sequence
  Cyclic GFR-binding peptide
SSLSILFFDAANNVVLKVYPIGKTPKI

SEQ ID NO: 98762 - protein, 27 aa, Artificial Sequence
  Cyclic GFR-binding peptide
IGKTPKISMEGIIVNSSDDMIQVTINS

SEQ ID NO: 98763 - protein, 27 aa, Artificial Sequence
  Cyclic GFR-binding peptide
IGKTPKIVTAKKVVKENEDIKRMQVPR

SEQ ID NO: 98764 - protein, 27 aa, Artificial Sequence
  Cyclic GFR-binding peptide
IGKTPKISMEGIVVKDYEDMIQMTINS

SEQ ID NO: 98765 - protein, 27 aa, Artificial Sequence
  Cyclic GFR-binding peptide
IGKTPKIVTAKKIKPTKGIIKRIQVPR

SEQ ID NO: 98766 - protein, 27 aa, Artificial Sequence
  Cyclic GFR-binding peptide
IGKTPKISMEGIVKPTRGVMIQITINS

SEQ ID NO: 98767 - protein, 29 aa, Artificial Sequence
  Cyclic GFR-binding peptide
IGKTPKINSLQEFIPKKRVIEYYVVPLPE

SEQ ID NO: 98768 - protein, 27 aa, Artificial Sequence
  Cyclic GFR-binding peptide
IGKTPKIVQVEKVKPKRGVVKAIKVSR

SEQ ID NO: 98769 - protein, 27 aa, Artificial Sequence
  Cyclic GFR-binding peptide
IGKTPKIVQVEKVVKENEDVKAMKVSR

SEQ ID NO: 98770 - protein, 27 aa, Artificial Sequence
  Cyclic GFR-binding peptide
IGKTPKIVTAKKIVNSSDDIKRVQVPR

SEQ ID NO: 98771 - protein, 27 aa, Artificial Sequence
  Cyclic GFR-binding peptide
IGKTPKIVQVEKIKPTKGIVKAIKVSR

SEQ ID NO: 98772 - protein, 29 aa, Artificial Sequence
  Cyclic GFR-binding peptide
IGKTPKINSLQEFIPKKRVIEYYLVTLPE

SEQ ID NO: 98773 - protein, 27 aa, Artificial Sequence
  Cyclic GFR-binding peptide
IGKTPKIVQVEKIVNSSDDVKAVKVSR

SEQ ID NO: 98774 - protein, 27 aa, Artificial Sequence
  Cyclic GFR-binding peptide
IGKTPKIVTAKKVKPKRGVIKRIQVPR

SEQ ID NO: 98775 - protein, 27 aa, Artificial Sequence
  Cyclic GFR-binding peptide
IGKTPKIVQVEKVKPTRGVVKAIKVSR

SEQ ID NO: 98776 - protein, 27 aa, Artificial Sequence
  Cyclic GFR-binding peptide
IGKTPKIVTAKKVKPTRGVIKRIQVPR

SEQ ID NO: 98777 - protein, 29 aa, Artificial Sequence
  Cyclic GFR-binding peptide
IGKTPKINSLQELKPKKRVYEYYLVTLPE

SEQ ID NO: 98778 - protein, 27 aa, Artificial Sequence
  Cyclic GFR-binding peptide
IGKTPKISMEGIVKPKRGVMIQITINS

SEQ ID NO: 98779 - protein, 27 aa, Artificial Sequence
  Cyclic GFR-binding peptide
IGKTPKISMEGIVVKENEDMIQMTINS

SEQ ID NO: 98780 - protein, 27 aa, Artificial Sequence
  Cyclic GFR-binding peptide
IGKTPKISMEGIIKPTKGIMIQITINS

SEQ ID NO: 98781 - protein, 29 aa, Artificial Sequence
  Cyclic GFR-binding peptide
IGKTPKINSLQEHQGQHPKIRYYLMTLPE

SEQ ID NO: 98782 - protein, 27 aa, Artificial Sequence
  Cyclic GFR-binding peptide
IGKTPKIVTAKKVVKDYEDIKRMQVPR

SEQ ID NO: 98783 - protein, 29 aa, Artificial Sequence
  Cyclic GFR-binding peptide
IGKTPKINSLQEHQGQHPKIRYYVMPLPE

SEQ ID NO: 98784 - protein, 29 aa, Artificial Sequence
  Cyclic GFR-binding peptide
IGKTPKINSLQELKPKKRVYEYYVVPLPE

SEQ ID NO: 98785 - protein, 27 aa, Artificial Sequence
  Cyclic GFR-binding peptide
IGKTPKIVQVEKVVKDYEDVKAMKVSR

SEQ ID NO: 98786 - protein, 27 aa, Artificial Sequence
  Cyclic GFR-binding peptide
SNITVQIMDDSSNVIIGEMSIGKTPKI

SEQ ID NO: 98787 - protein, 27 aa, Artificial Sequence
  Cyclic GFR-binding peptide
RPVQMRKIDENEKVVKKATVIGKTPKI

SEQ ID NO: 98788 - protein, 27 aa, Artificial Sequence
  Cyclic GFR-binding peptide
SNITMQIMDEYDKVVIGEMSIGKTPKI

SEQ ID NO: 98789 - protein, 27 aa, Artificial Sequence
  Cyclic GFR-binding peptide
RPVQIRKIIGKTPKIKKATVIGKTPKI

SEQ ID NO: 98790 - protein, 27 aa, Artificial Sequence
  Cyclic GFR-binding peptide
SNITIQIMVGRTPKVIGEMSIGKTPKI

SEQ ID NO: 98791 - protein, 29 aa, Artificial Sequence
  Cyclic GFR-binding peptide
EPLPVVYYEIVRKKPIFEQLSNIGKTPKI

SEQ ID NO: 98792 - protein, 27 aa, Artificial Sequence
  Cyclic GFR-binding peptide
RSVKIAKVVGRKPKVKEVQVIGKTPKI

SEQ ID NO: 98793 - protein, 27 aa, Artificial Sequence
  Cyclic GFR-binding peptide
RSVKMAKVDENEKVVKEVQVIGKTPKI

SEQ ID NO: 98794 - protein, 27 aa, Artificial Sequence
  Cyclic GFR-binding peptide
RPVQVRKIDDSSNVIKKATVIGKTPKI

SEQ ID NO: 98795 - protein, 27 aa, Artificial Sequence
  Cyclic GFR-binding peptide
RSVKIAKVIGKTPKIKEVQVIGKTPKI

SEQ ID NO: 98796 - protein, 29 aa, Artificial Sequence
  Cyclic GFR-binding peptide
EPLTVLYYEIVRKKPIFEQLSNIGKTPKI

SEQ ID NO: 98797 - protein, 27 aa, Artificial Sequence
  Cyclic GFR-binding peptide
RSVKVAKVDDSSNVIKEVQVIGKTPKI

SEQ ID NO: 98798 - protein, 27 aa, Artificial Sequence
  Cyclic GFR-binding peptide
RPVQIRKIVGRKPKVKKATVIGKTPKI

SEQ ID NO: 98799 - protein, 27 aa, Artificial Sequence
  Cyclic GFR-binding peptide
RSVKIAKVVGRTPKVKEVQVIGKTPKI

SEQ ID NO: 98800 - protein, 27 aa, Artificial Sequence
  Cyclic GFR-binding peptide
RPVQIRKIVGRTPKVKKATVIGKTPKI

SEQ ID NO: 98801 - protein, 29 aa, Artificial Sequence
  Cyclic GFR-binding peptide
EPLTVLYYEYVRKKPKLEQLSNIGKTPKI

SEQ ID NO: 98802 - protein, 27 aa, Artificial Sequence
  Cyclic GFR-binding peptide
SNITIQIMVGRKPKVIGEMSIGKTPKI

SEQ ID NO: 98803 - protein, 27 aa, Artificial Sequence
  Cyclic GFR-binding peptide
SNITMQIMDENEKVVIGEMSIGKTPKI

SEQ ID NO: 98804 - protein, 27 aa, Artificial Sequence
  Cyclic GFR-binding peptide
SNITIQIMIGKTPKIIGEMSIGKTPKI

SEQ ID NO: 98805 - protein, 29 aa, Artificial Sequence
  Cyclic GFR-binding peptide
EPLTMLYYRIKPHQGQHEQLSNIGKTPKI

SEQ ID NO: 98806 - protein, 27 aa, Artificial Sequence
  Cyclic GFR-binding peptide
RPVQMRKIDEYDKVVKKATVIGKTPKI

SEQ ID NO: 98807 - protein, 29 aa, Artificial Sequence
  Cyclic GFR-binding peptide
EPLPMVYYRIKPHQGQHEQLSNIGKTPKI

SEQ ID NO: 98808 - protein, 29 aa, Artificial Sequence
  Cyclic GFR-binding peptide
EPLPVVYYEYVRKKPKLEQLSNIGKTPKI

SEQ ID NO: 98809 - protein, 27 aa, Artificial Sequence
  Cyclic GFR-binding peptide
RSVKMAKVDEYDKVVKEVQVIGKTPKI

SEQ ID NO: 98810 - protein, 27 aa, Artificial Sequence
  Cyclic GFR-binding peptide
IGKTPKIRYKKLIIQQKDNFYLMSIAN

SEQ ID NO: 98811 - protein, 27 aa, Artificial Sequence
  Cyclic GFR-binding peptide
IGKTPKIRYKKLLLVRGNDFYLMSIAN

SEQ ID NO: 98812 - protein, 27 aa, Artificial Sequence
  Cyclic GFR-binding peptide
NAISMLYFNDKQQIILKKYRIGKTPKI

SEQ ID NO: 98813 - protein, 27 aa, Artificial Sequence
  Cyclic GFR-binding peptide
NAISMLYFDNGRVLLLKKYRIGKTPKI

SEQ ID NO: 98814 - protein, 27 aa, Artificial Sequence
  Cyclic GFR-binding peptide
IGKTPKIEYKFKVVNKNEDLYLISIPE

SEQ ID NO: 98815 - protein, 27 aa, Artificial Sequence
  Cyclic GFR-binding peptide
IGKTPKIPIKGYVKPTRGVFYLINIPS

SEQ ID NO: 98816 - protein, 27 aa, Artificial Sequence
  Cyclic GFR-binding peptide
IGKTPKIEYKFKLLVRGNDLYLMSIPE

SEQ ID NO: 98817 - protein, 27 aa, Artificial Sequence
  Cyclic GFR-binding peptide
IGKTPKIYHYKLVVNKNEDKYLISIPS

SEQ ID NO: 98818 - protein, 27 aa, Artificial Sequence
  Cyclic GFR-binding peptide
IGKTPKIRHKRLLLVRGNDYYLMSTAS

SEQ ID NO: 98819 - protein, 27 aa, Artificial Sequence
  Cyclic GFR-binding peptide
IGKTPKIYHYKLLLVRGNDKYLMSIPS

SEQ ID NO: 98820 - protein, 27 aa, Artificial Sequence
  Cyclic GFR-binding peptide
IGKTPKIRHKRLVVNKNEDYYLISTAS

SEQ ID NO: 98821 - protein, 27 aa, Artificial Sequence
  Cyclic GFR-binding peptide
IGKTPKIRYKKLVVNKNEDFYLISIAN

SEQ ID NO: 98822 - protein, 27 aa, Artificial Sequence
  Cyclic GFR-binding peptide
IGKTPKIPIKGYVVNKNEDFYLINIPS

SEQ ID NO: 98823 - protein, 27 aa, Artificial Sequence
  Cyclic GFR-binding peptide
IGKTPKIPIKGYIKPTKGIFYLINIPS

SEQ ID NO: 98824 - protein, 27 aa, Artificial Sequence
  Cyclic GFR-binding peptide
IGKTPKIRHKRLYTVVGKDYYLISTAS

SEQ ID NO: 98825 - protein, 27 aa, Artificial Sequence
  Cyclic GFR-binding peptide
IGKTPKIEYKFKVVNNASDLYLISIPE

SEQ ID NO: 98826 - protein, 27 aa, Artificial Sequence
  Cyclic GFR-binding peptide
IGKTPKIRHKRLIIQQKDNYYLMSTAS

SEQ ID NO: 98827 - protein, 27 aa, Artificial Sequence
  Cyclic GFR-binding peptide
IGKTPKIEYKFKIIQQKDNLYLMSIPE

SEQ ID NO: 98828 - protein, 27 aa, Artificial Sequence
  Cyclic GFR-binding peptide
IGKTPKIPIKGYVKPKRGVFYLINIPS

SEQ ID NO: 98829 - protein, 27 aa, Artificial Sequence
  Cyclic GFR-binding peptide
IGKTPKIRHKRLVVNNASDYYLISTAS

SEQ ID NO: 98830 - protein, 27 aa, Artificial Sequence
  Cyclic GFR-binding peptide
IGKTPKIYHYKLVVNNASDKYLISIPS

SEQ ID NO: 98831 - protein, 27 aa, Artificial Sequence
  Cyclic GFR-binding peptide
IGKTPKIYHYKLIIQQKDNKYLMSIPS

SEQ ID NO: 98832 - protein, 27 aa, Artificial Sequence
  Cyclic GFR-binding peptide
IGKTPKIRHKRLVVNNAADYYLISTAS

SEQ ID NO: 98833 - protein, 27 aa, Artificial Sequence
  Cyclic GFR-binding peptide
EPISILYLDENKNVVKFKYEIGKTPKI

SEQ ID NO: 98834 - protein, 27 aa, Artificial Sequence
  Cyclic GFR-binding peptide
SPINILYFVGRTPKVYGKIPIGKTPKI

SEQ ID NO: 98835 - protein, 27 aa, Artificial Sequence
  Cyclic GFR-binding peptide
EPISMLYLDNGRVLLKFKYEIGKTPKI

SEQ ID NO: 98836 - protein, 27 aa, Artificial Sequence
  Cyclic GFR-binding peptide
SPISILYKDENKNVVLKYHYIGKTPKI

SEQ ID NO: 98837 - protein, 27 aa, Artificial Sequence
  Cyclic GFR-binding peptide
SATSMLYYDNGRVLLLRKHRIGKTPKI

SEQ ID NO: 98838 - protein, 27 aa, Artificial Sequence
  Cyclic GFR-binding peptide
SPISMLYKDNGRVLLLKYHYIGKTPKI

SEQ ID NO: 98839 - protein, 27 aa, Artificial Sequence
  Cyclic GFR-binding peptide
SATSILYYDENKNVVLRKHRIGKTPKI

SEQ ID NO: 98840 - protein, 27 aa, Artificial Sequence
  Cyclic GFR-binding peptide
NAISILYFDENKNVVLKKYRIGKTPKI

SEQ ID NO: 98841 - protein, 27 aa, Artificial Sequence
  Cyclic GFR-binding peptide
SPINILYFDENKNVVYGKIPIGKTPKI

SEQ ID NO: 98842 - protein, 27 aa, Artificial Sequence
  Cyclic GFR-binding peptide
SPINILYFIGKTPKIYGKIPIGKTPKI

SEQ ID NO: 98843 - protein, 27 aa, Artificial Sequence
  Cyclic GFR-binding peptide
SATSILYYDKGVVTYLRKHRIGKTPKI

SEQ ID NO: 98844 - protein, 27 aa, Artificial Sequence
  Cyclic GFR-binding peptide
EPISILYLDSANNVVKFKYEIGKTPKI

SEQ ID NO: 98845 - protein, 27 aa, Artificial Sequence
  Cyclic GFR-binding peptide
SATSMLYYNDKQQIILRKHRIGKTPKI

SEQ ID NO: 98846 - protein, 27 aa, Artificial Sequence
  Cyclic GFR-binding peptide
EPISMLYLNDKQQIIKFKYEIGKTPKI

SEQ ID NO: 98847 - protein, 27 aa, Artificial Sequence
  Cyclic GFR-binding peptide
SPINILYFVGRKPKVYGKIPIGKTPKI

SEQ ID NO: 98848 - protein, 27 aa, Artificial Sequence
  Cyclic GFR-binding peptide
SATSILYYDSANNVVLRKHRIGKTPKI

SEQ ID NO: 98849 - protein, 27 aa, Artificial Sequence
  Cyclic GFR-binding peptide
SPISILYKDSANNVVLKYHYIGKTPKI

SEQ ID NO: 98850 - protein, 27 aa, Artificial Sequence
  Cyclic GFR-binding peptide
SPISMLYKNDKQQIILKYHYIGKTPKI

SEQ ID NO: 98851 - protein, 27 aa, Artificial Sequence
  Cyclic GFR-binding peptide
SATSILYYDAANNVVLRKHRIGKTPKI

SEQ ID NO: 98852 - protein, 27 aa, Artificial Sequence
  Cyclic GFR-binding peptide
IGKTPKISMEGIIIQQKDNMIQMTINS

SEQ ID NO: 98853 - protein, 27 aa, Artificial Sequence
  Cyclic GFR-binding peptide
IGKTPKISMEGLVKPKRGVMIQITINS

SEQ ID NO: 98854 - protein, 27 aa, Artificial Sequence
  Cyclic GFR-binding peptide
IGKTPKISMEGLVVNNASDMIQITINS

SEQ ID NO: 98855 - protein, 27 aa, Artificial Sequence
  Cyclic GFR-binding peptide
IGKTPKISMEGILLVRGNDMIQMTINS

SEQ ID NO: 98856 - protein, 27 aa, Artificial Sequence
  Cyclic GFR-binding peptide
IGKTPKISMEGLIKPTKGIMIQITINS

SEQ ID NO: 98857 - protein, 27 aa, Artificial Sequence
  Cyclic GFR-binding peptide
IGKTPKISMEGLIVNSSDDMIQVTINS

SEQ ID NO: 98858 - protein, 27 aa, Artificial Sequence
  Cyclic GFR-binding peptide
IGKTPKISMEGIVVNNASDMIQITINS

SEQ ID NO: 98859 - protein, 27 aa, Artificial Sequence
  Cyclic GFR-binding peptide
IGKTPKISMEGLVVNNAADMIQITINS

SEQ ID NO: 98860 - protein, 27 aa, Artificial Sequence
  Cyclic GFR-binding peptide
IGKTPKISMEGLLLVRGNDMIQMTINS

SEQ ID NO: 98861 - protein, 27 aa, Artificial Sequence
  Cyclic GFR-binding peptide
IGKTPKISMEGLIIQQKDNMIQMTINS

SEQ ID NO: 98862 - protein, 27 aa, Artificial Sequence
  Cyclic GFR-binding peptide
IGKTPKISMEGIVVNNAADMIQITINS

SEQ ID NO: 98863 - protein, 27 aa, Artificial Sequence
  Cyclic GFR-binding peptide
IGKTPKISMEGLVKPTRGVMIQITINS

SEQ ID NO: 98864 - protein, 27 aa, Artificial Sequence
  Cyclic GFR-binding peptide
SNITMQIMNDKQQIIIGEMSIGKTPKI

SEQ ID NO: 98865 - protein, 27 aa, Artificial Sequence
  Cyclic GFR-binding peptide
SNITIQIMVGRKPKVLGEMSIGKTPKI

SEQ ID NO: 98866 - protein, 27 aa, Artificial Sequence
  Cyclic GFR-binding peptide
SNITIQIMDSANNVVLGEMSIGKTPKI

SEQ ID NO: 98867 - protein, 27 aa, Artificial Sequence
  Cyclic GFR-binding peptide
SNITMQIMDNGRVLLIGEMSIGKTPKI

SEQ ID NO: 98868 - protein, 27 aa, Artificial Sequence
  Cyclic GFR-binding peptide
SNITIQIMIGKTPKILGEMSIGKTPKI

SEQ ID NO: 98869 - protein, 27 aa, Artificial Sequence
  Cyclic GFR-binding peptide
SNITVQIMDDSSNVILGEMSIGKTPKI

SEQ ID NO: 98870 - protein, 27 aa, Artificial Sequence
  Cyclic GFR-binding peptide
SNITIQIMDSANNVVIGEMSIGKTPKI

SEQ ID NO: 98871 - protein, 27 aa, Artificial Sequence
  Cyclic GFR-binding peptide
SNITIQIMDAANNVVLGEMSIGKTPKI

SEQ ID NO: 98872 - protein, 27 aa, Artificial Sequence
  Cyclic GFR-binding peptide
SNITMQIMDNGRVLLLGEMSIGKTPKI

SEQ ID NO: 98873 - protein, 27 aa, Artificial Sequence
  Cyclic GFR-binding peptide
SNITMQIMNDKQQIILGEMSIGKTPKI

SEQ ID NO: 98874 - protein, 27 aa, Artificial Sequence
  Cyclic GFR-binding peptide
SNITIQIMDAANNVVIGEMSIGKTPKI

SEQ ID NO: 98875 - protein, 27 aa, Artificial Sequence
  Cyclic GFR-binding peptide
SNITIQIMVGRTPKVLGEMSIGKTPKI

SEQ ID NO: 98876 - protein, 27 aa, Artificial Sequence
  Cyclic GFR-binding peptide
IGKTPKIQYNKLVVNKNEDLYLISIAS

SEQ ID NO: 98877 - protein, 27 aa, Artificial Sequence
  Cyclic GFR-binding peptide
IGKTPKIQYNKLVVNNAADLYLISIAS

SEQ ID NO: 98878 - protein, 27 aa, Artificial Sequence
  Cyclic GFR-binding peptide
IGKTPKIQYNKLIIQQKDNLYLMSIAS

SEQ ID NO: 98879 - protein, 27 aa, Artificial Sequence
  Cyclic GFR-binding peptide
IGKTPKIQYNKLLLVRGNDLYLMSIAS

SEQ ID NO: 98880 - protein, 27 aa, Artificial Sequence
  Cyclic GFR-binding peptide
IGKTPKIQYNKLYTVVGKDLYLISIAS

SEQ ID NO: 98881 - protein, 27 aa, Artificial Sequence
  Cyclic GFR-binding peptide
SAISILYLDENKNVVLKNYQIGKTPKI

SEQ ID NO: 98882 - protein, 27 aa, Artificial Sequence
  Cyclic GFR-binding peptide
SAISILYLDAANNVVLKNYQIGKTPKI

SEQ ID NO: 98883 - protein, 27 aa, Artificial Sequence
  Cyclic GFR-binding peptide
SAISMLYLNDKQQIILKNYQIGKTPKI

SEQ ID NO: 98884 - protein, 27 aa, Artificial Sequence
  Cyclic GFR-binding peptide
SAISMLYLDNGRVLLLKNYQIGKTPKI

SEQ ID NO: 98885 - protein, 27 aa, Artificial Sequence
  Cyclic GFR-binding peptide
SAISILYLDKGVVTYLKNYQIGKTPKI

SEQ ID NO: 98886 - protein, 27 aa, Artificial Sequence
  Cyclic GFR-binding peptide
VGRTPKVRYKKLIKPTKGIFYLISIAN

SEQ ID NO: 98887 - protein, 29 aa, Artificial Sequence
  Cyclic GFR-binding peptide
VGRTPKVRHKRLFIPKKRVIEYYLVSTAS

SEQ ID NO: 98888 - protein, 27 aa, Artificial Sequence
  Cyclic GFR-binding peptide
VGRTPKVYHYKLVVKDYEDKYLMSIPS

SEQ ID NO: 98889 - protein, 27 aa, Artificial Sequence
  Cyclic GFR-binding peptide
VGRTPKVQYNKLIVNNSSDLYLVSIAS

SEQ ID NO: 98890 - protein, 27 aa, Artificial Sequence
  Cyclic GFR-binding peptide
VGRTPKVRYKKLVVKDYEDFYLMSIAN

SEQ ID NO: 98891 - protein, 27 aa, Artificial Sequence
  Cyclic GFR-binding peptide
VGRTPKVRYKKLVKPTRGVFYLISIAN

SEQ ID NO: 98892 - protein, 27 aa, Artificial Sequence
  Cyclic GFR-binding peptide
VGRTPKVRHKRLVVKENEDYYLMSTAS

SEQ ID NO: 98893 - protein, 27 aa, Artificial Sequence
  Cyclic GFR-binding peptide
VGRTPKVYHYKLIKPTKGIKYLISIPS

SEQ ID NO: 98894 - protein, 29 aa, Artificial Sequence
  Cyclic GFR-binding peptide
VGRTPKVRYKKLFIPKKRVIEFYLVSIAN

SEQ ID NO: 98895 - protein, 27 aa, Artificial Sequence
  Cyclic GFR-binding peptide
VGRTPKVYHYKLVVKENEDKYLMSIPS

SEQ ID NO: 98896 - protein, 27 aa, Artificial Sequence
  Cyclic GFR-binding peptide
VGRTPKVRHKRLVKPKRGVYYLISTAS

SEQ ID NO: 98897 - protein, 27 aa, Artificial Sequence
  Cyclic GFR-binding peptide
VGRTPKVYHYKLVKPKRGVKYLISIPS

SEQ ID NO: 98898 - protein, 29 aa, Artificial Sequence
  Cyclic GFR-binding peptide
VGRTPKVQYNKLFIPKKRVIELYLVSIAS

SEQ ID NO: 98899 - protein, 27 aa, Artificial Sequence
  Cyclic GFR-binding peptide
VGRTPKVQYNKLVKPTRGVLYLISIAS

SEQ ID NO: 98900 - protein, 27 aa, Artificial Sequence
  Cyclic GFR-binding peptide
VGRTPKVRYKKLVVKENEDFYLMSIAN

SEQ ID NO: 98901 - protein, 27 aa, Artificial Sequence
  Cyclic GFR-binding peptide
VGRTPKVQYNKLTPVGMDDLYLVSIAS

SEQ ID NO: 98902 - protein, 27 aa, Artificial Sequence
  Cyclic GFR-binding peptide
VGRTPKVRYKKLTPVGMDDFYLVSIAN

SEQ ID NO: 98903 - protein, 27 aa, Artificial Sequence
  Cyclic GFR-binding peptide
VGRTPKVRYKKLVKPKRGVFYLISIAN

SEQ ID NO: 98904 - protein, 27 aa, Artificial Sequence
  Cyclic GFR-binding peptide
VGRTPKVQYNKLVVKENEDLYLMSIAS

SEQ ID NO: 98905 - protein, 27 aa, Artificial Sequence
  Cyclic GFR-binding peptide
VGRTPKVYHYKLIVNSSDDKYLVSIPS

SEQ ID NO: 98906 - protein, 27 aa, Artificial Sequence
  Cyclic GFR-binding peptide
VGRTPKVQYNKLVKPKRGVLYLISIAS

SEQ ID NO: 98907 - protein, 27 aa, Artificial Sequence
  Cyclic GFR-binding peptide
VGRTPKVRYKKLIVNNSSDFYLVSIAN

SEQ ID NO: 98908 - protein, 27 aa, Artificial Sequence
  Cyclic GFR-binding peptide
VGRTPKVRYKKLIVNSSDDFYLVSIAN

SEQ ID NO: 98909 - protein, 27 aa, Artificial Sequence
  Cyclic GFR-binding peptide
VGRTPKVRHKRLVKPTRGVYYLISTAS

SEQ ID NO: 98910 - protein, 29 aa, Artificial Sequence
  Cyclic GFR-binding peptide
VGRTPKVYHYKLFIPKKRVIEKYLVSIPS

SEQ ID NO: 98911 - protein, 27 aa, Artificial Sequence
  Cyclic GFR-binding peptide
VGRTPKVRHKRLIKPTKGIYYLISTAS

SEQ ID NO: 98912 - protein, 27 aa, Artificial Sequence
  Cyclic GFR-binding peptide
VGRTPKVRHKRLTPVGMDDYYLVSTAS

SEQ ID NO: 98913 - protein, 27 aa, Artificial Sequence
  Cyclic GFR-binding peptide
VGRTPKVYHYKLTPVGMDDKYLVSIPS

SEQ ID NO: 98914 - protein, 27 aa, Artificial Sequence
  Cyclic GFR-binding peptide
VGRTPKVYHYKLIVNNSSDKYLVSIPS

SEQ ID NO: 98915 - protein, 27 aa, Artificial Sequence
  Cyclic GFR-binding peptide
VGRTPKVRHKRLIVNNSSDYYLVSTAS

SEQ ID NO: 98916 - protein, 27 aa, Artificial Sequence
  Cyclic GFR-binding peptide
VGRTPKVYHYKLVKPTRGVKYLISIPS

SEQ ID NO: 98917 - protein, 27 aa, Artificial Sequence
  Cyclic GFR-binding peptide
VGRTPKVRHKRLIVNSSDDYYLVSTAS

SEQ ID NO: 98918 - protein, 27 aa, Artificial Sequence
  Cyclic GFR-binding peptide
VGRTPKVRHKRLVVKDYEDYYLMSTAS

SEQ ID NO: 98919 - protein, 27 aa, Artificial Sequence
  Cyclic GFR-binding peptide
VGRTPKVQYNKLIKPTKGILYLISIAS

SEQ ID NO: 98920 - protein, 27 aa, Artificial Sequence
  Cyclic GFR-binding peptide
VGRTPKVQYNKLVVKDYEDLYLMSIAS

SEQ ID NO: 98921 - protein, 27 aa, Artificial Sequence
  Cyclic GFR-binding peptide
VGRTPKVQYNKLIVNSSDDLYLVSIAS

SEQ ID NO: 98922 - protein, 27 aa, Artificial Sequence
  Cyclic GFR-binding peptide
NAISILYFIGKTPKILKKYRVGRTPKV

SEQ ID NO: 98923 - protein, 29 aa, Artificial Sequence
  Cyclic GFR-binding peptide
SATSVLYYEIVRKKPIFLRKHRVGRTPKV

SEQ ID NO: 98924 - protein, 27 aa, Artificial Sequence
  Cyclic GFR-binding peptide
SPISMLYKDEYDKVVLKYHYVGRTPKV

SEQ ID NO: 98925 - protein, 27 aa, Artificial Sequence
  Cyclic GFR-binding peptide
SAISVLYLDSSNNVILKNYQVGRTPKV

SEQ ID NO: 98926 - protein, 27 aa, Artificial Sequence
  Cyclic GFR-binding peptide
NAISMLYFDEYDKVVLKKYRVGRTPKV

SEQ ID NO: 98927 - protein, 27 aa, Artificial Sequence
  Cyclic GFR-binding peptide
NAISILYFVGRTPKVLKKYRVGRTPKV

SEQ ID NO: 98928 - protein, 27 aa, Artificial Sequence
  Cyclic GFR-binding peptide
SATSMLYYDENEKVVLRKHRVGRTPKV

SEQ ID NO: 98929 - protein, 27 aa, Artificial Sequence
  Cyclic GFR-binding peptide
SPISILYKIGKTPKILKYHYVGRTPKV

SEQ ID NO: 98930 - protein, 29 aa, Artificial Sequence
  Cyclic GFR-binding peptide
NAISVLYFEIVRKKPIFLKKYRVGRTPKV

SEQ ID NO: 98931 - protein, 27 aa, Artificial Sequence
  Cyclic GFR-binding peptide
SPISMLYKDENEKVVLKYHYVGRTPKV

SEQ ID NO: 98932 - protein, 27 aa, Artificial Sequence
  Cyclic GFR-binding peptide
SATSILYYVGRKPKVLRKHRVGRTPKV

SEQ ID NO: 98933 - protein, 27 aa, Artificial Sequence
  Cyclic GFR-binding peptide
SPISILYKVGRKPKVLKYHYVGRTPKV

SEQ ID NO: 98934 - protein, 29 aa, Artificial Sequence
  Cyclic GFR-binding peptide
SAISVLYLEIVRKKPIFLKNYQVGRTPKV

SEQ ID NO: 98935 - protein, 27 aa, Artificial Sequence
  Cyclic GFR-binding peptide
NAISMLYFDENEKVVLKKYRVGRTPKV

SEQ ID NO: 98936 - protein, 27 aa, Artificial Sequence
  Cyclic GFR-binding peptide
SAISVLYLDDMGVPTLKNYQVGRTPKV

SEQ ID NO: 98937 - protein, 27 aa, Artificial Sequence
  Cyclic GFR-binding peptide
NAISVLYFDDMGVPTLKKYRVGRTPKV

SEQ ID NO: 98938 - protein, 27 aa, Artificial Sequence
  Cyclic GFR-binding peptide
NAISILYFVGRKPKVLKKYRVGRTPKV

SEQ ID NO: 98939 - protein, 27 aa, Artificial Sequence
  Cyclic GFR-binding peptide
SAISMLYLDENEKVVLKNYQVGRTPKV

SEQ ID NO: 98940 - protein, 27 aa, Artificial Sequence
  Cyclic GFR-binding peptide
SPISVLYKDDSSNVILKYHYVGRTPKV

SEQ ID NO: 98941 - protein, 27 aa, Artificial Sequence
  Cyclic GFR-binding peptide
SAISILYLVGRKPKVLKNYQVGRTPKV

SEQ ID NO: 98942 - protein, 27 aa, Artificial Sequence
  Cyclic GFR-binding peptide
NAISVLYFDSSNNVILKKYRVGRTPKV

SEQ ID NO: 98943 - protein, 27 aa, Artificial Sequence
  Cyclic GFR-binding peptide
NAISVLYFDDSSNVILKKYRVGRTPKV

SEQ ID NO: 98944 - protein, 27 aa, Artificial Sequence
  Cyclic GFR-binding peptide
SATSILYYVGRTPKVLRKHRVGRTPKV

SEQ ID NO: 98945 - protein, 29 aa, Artificial Sequence
  Cyclic GFR-binding peptide
SPISVLYKEIVRKKPIFLKYHYVGRTPKV

SEQ ID NO: 98946 - protein, 27 aa, Artificial Sequence
  Cyclic GFR-binding peptide
SATSILYYIGKTPKILRKHRVGRTPKV

SEQ ID NO: 98947 - protein, 27 aa, Artificial Sequence
  Cyclic GFR-binding peptide
SATSVLYYDDMGVPTLRKHRVGRTPKV

SEQ ID NO: 98948 - protein, 27 aa, Artificial Sequence
  Cyclic GFR-binding peptide
SPISVLYKDDMGVPTLKYHYVGRTPKV

SEQ ID NO: 98949 - protein, 27 aa, Artificial Sequence
  Cyclic GFR-binding peptide
SPISVLYKDSSNNVILKYHYVGRTPKV

SEQ ID NO: 98950 - protein, 27 aa, Artificial Sequence
  Cyclic GFR-binding peptide
SATSVLYYDSSNNVILRKHRVGRTPKV

SEQ ID NO: 98951 - protein, 27 aa, Artificial Sequence
  Cyclic GFR-binding peptide
SPISILYKVGRTPKVLKYHYVGRTPKV

SEQ ID NO: 98952 - protein, 27 aa, Artificial Sequence
  Cyclic GFR-binding peptide
SATSVLYYDDSSNVILRKHRVGRTPKV

SEQ ID NO: 98953 - protein, 27 aa, Artificial Sequence
  Cyclic GFR-binding peptide
SATSMLYYDEYDKVVLRKHRVGRTPKV

SEQ ID NO: 98954 - protein, 27 aa, Artificial Sequence
  Cyclic GFR-binding peptide
SAISILYLIGKTPKILKNYQVGRTPKV

SEQ ID NO: 98955 - protein, 27 aa, Artificial Sequence
  Cyclic GFR-binding peptide
SAISMLYLDEYDKVVLKNYQVGRTPKV

SEQ ID NO: 98956 - protein, 27 aa, Artificial Sequence
  Cyclic GFR-binding peptide
SAISVLYLDDSSNVILKNYQVGRTPKV

SEQ ID NO: 98957 - protein, 27 aa, Artificial Sequence
  Cyclic GFR-binding peptide
VGRTPKVNSLQEVVKDYEDYYLMTLPE

SEQ ID NO: 98958 - protein, 27 aa, Artificial Sequence
  Cyclic GFR-binding peptide
VGRTPKVNSLQEIKPTKGIYYVIPLPE

SEQ ID NO: 98959 - protein, 27 aa, Artificial Sequence
  Cyclic GFR-binding peptide
VGRTPKVNSLQEVKPKRGVYYLITLPE

SEQ ID NO: 98960 - protein, 27 aa, Artificial Sequence
  Cyclic GFR-binding peptide
VGRTPKVNSLQEVKPTRGVYYVIPLPE

SEQ ID NO: 98961 - protein, 27 aa, Artificial Sequence
  Cyclic GFR-binding peptide
VGRTPKVEYQKYIVNSSDDIFLVSIPS

SEQ ID NO: 98962 - protein, 27 aa, Artificial Sequence
  Cyclic GFR-binding peptide
VGRTPKVEYQKYVKPTRGVIFLISIPS

SEQ ID NO: 98963 - protein, 27 aa, Artificial Sequence
  Cyclic GFR-binding peptide
VGRTPKVNSLQEVVKENEDYYLMTLPE

SEQ ID NO: 98964 - protein, 27 aa, Artificial Sequence
  Cyclic GFR-binding peptide
VGRTPKVNSLQEVVNNASDYYLITLPE

SEQ ID NO: 98965 - protein, 27 aa, Artificial Sequence
  Cyclic GFR-binding peptide
VGRTPKVNSLQEVKPKRGVYYVIPLPE

SEQ ID NO: 98966 - protein, 27 aa, Artificial Sequence
  Cyclic GFR-binding peptide
VGRTPKVNSLQEVVNNASDYYVIPLPE

SEQ ID NO: 98967 - protein, 27 aa, Artificial Sequence
  Cyclic GFR-binding peptide
VGRTPKVNSLQEVKPTRGVYYLITLPE

SEQ ID NO: 98968 - protein, 27 aa, Artificial Sequence
  Cyclic GFR-binding peptide
VGRTPKVEYQKYIKPTKGIIFLISIPS

SEQ ID NO: 98969 - protein, 27 aa, Artificial Sequence
  Cyclic GFR-binding peptide
VGRTPKVEYQKYVVNNASDIFLISIPS

SEQ ID NO: 98970 - protein, 27 aa, Artificial Sequence
  Cyclic GFR-binding peptide
VGRTPKVNSLQEIVNSSDDYYVVPLPE

SEQ ID NO: 98971 - protein, 27 aa, Artificial Sequence
  Cyclic GFR-binding peptide
VGRTPKVNSLQEVVKDYEDYYVMPLPE

SEQ ID NO: 98972 - protein, 27 aa, Artificial Sequence
  Cyclic GFR-binding peptide
VGRTPKVEYQKYVVKENEDIFLMSIPS

SEQ ID NO: 98973 - protein, 27 aa, Artificial Sequence
  Cyclic GFR-binding peptide
VGRTPKVNSLQEVVKENEDYYVMPLPE

SEQ ID NO: 98974 - protein, 27 aa, Artificial Sequence
  Cyclic GFR-binding peptide
VGRTPKVEYQKYVVKDYEDIFLMSIPS

SEQ ID NO: 98975 - protein, 27 aa, Artificial Sequence
  Cyclic GFR-binding peptide
VGRTPKVQYNKLVVNNASDLYLISIAS

SEQ ID NO: 98976 - protein, 27 aa, Artificial Sequence
  Cyclic GFR-binding peptide
VGRTPKVNSLQEIKPTKGIYYLITLPE

SEQ ID NO: 98977 - protein, 27 aa, Artificial Sequence
  Cyclic GFR-binding peptide
VGRTPKVEYQKYVKPKRGVIFLISIPS

SEQ ID NO: 98978 - protein, 27 aa, Artificial Sequence
  Cyclic GFR-binding peptide
VGRTPKVRYKKLVVNNASDFYLISIAN

SEQ ID NO: 98979 - protein, 27 aa, Artificial Sequence
  Cyclic GFR-binding peptide
VGRTPKVNSLQEIVNSSDDYYLVTLPE

SEQ ID NO: 98980 - protein, 27 aa, Artificial Sequence
  Cyclic GFR-binding peptide
EPLTMLYYDEYDKVVEQLSNVGRTPKV

SEQ ID NO: 98981 - protein, 27 aa, Artificial Sequence
  Cyclic GFR-binding peptide
EPLPIVYYIGKTPKIEQLSNVGRTPKV

SEQ ID NO: 98982 - protein, 27 aa, Artificial Sequence
  Cyclic GFR-binding peptide
EPLTILYYVGRKPKVEQLSNVGRTPKV

SEQ ID NO: 98983 - protein, 27 aa, Artificial Sequence
  Cyclic GFR-binding peptide
EPLPIVYYVGRTPKVEQLSNVGRTPKV

SEQ ID NO: 98984 - protein, 27 aa, Artificial Sequence
  Cyclic GFR-binding peptide
SPISVLFIDDSSNVIYKQYEVGRTPKV

SEQ ID NO: 98985 - protein, 27 aa, Artificial Sequence
  Cyclic GFR-binding peptide
SPISILFIVGRTPKVYKQYEVGRTPKV

SEQ ID NO: 98986 - protein, 27 aa, Artificial Sequence
  Cyclic GFR-binding peptide
EPLTMLYYDENEKVVEQLSNVGRTPKV

SEQ ID NO: 98987 - protein, 27 aa, Artificial Sequence
  Cyclic GFR-binding peptide
EPLTILYYDSANNVVEQLSNVGRTPKV

SEQ ID NO: 98988 - protein, 27 aa, Artificial Sequence
  Cyclic GFR-binding peptide
EPLPIVYYVGRKPKVEQLSNVGRTPKV

SEQ ID NO: 98989 - protein, 27 aa, Artificial Sequence
  Cyclic GFR-binding peptide
EPLPIVYYDSANNVVEQLSNVGRTPKV

SEQ ID NO: 98990 - protein, 27 aa, Artificial Sequence
  Cyclic GFR-binding peptide
EPLTILYYVGRTPKVEQLSNVGRTPKV

SEQ ID NO: 98991 - protein, 27 aa, Artificial Sequence
  Cyclic GFR-binding peptide
SPISILFIIGKTPKIYKQYEVGRTPKV

SEQ ID NO: 98992 - protein, 27 aa, Artificial Sequence
  Cyclic GFR-binding peptide
SPISILFIDSANNVVYKQYEVGRTPKV

SEQ ID NO: 98993 - protein, 27 aa, Artificial Sequence
  Cyclic GFR-binding peptide
EPLPVVYYDDSSNVIEQLSNVGRTPKV

SEQ ID NO: 98994 - protein, 27 aa, Artificial Sequence
  Cyclic GFR-binding peptide
EPLPMVYYDEYDKVVEQLSNVGRTPKV

SEQ ID NO: 98995 - protein, 27 aa, Artificial Sequence
  Cyclic GFR-binding peptide
SPISMLFIDENEKVVYKQYEVGRTPKV

SEQ ID NO: 98996 - protein, 27 aa, Artificial Sequence
  Cyclic GFR-binding peptide
EPLPMVYYDENEKVVEQLSNVGRTPKV

SEQ ID NO: 98997 - protein, 27 aa, Artificial Sequence
  Cyclic GFR-binding peptide
SPISMLFIDEYDKVVYKQYEVGRTPKV

SEQ ID NO: 98998 - protein, 27 aa, Artificial Sequence
  Cyclic GFR-binding peptide
SAISILYLDSANNVVLKNYQVGRTPKV

SEQ ID NO: 98999 - protein, 27 aa, Artificial Sequence
  Cyclic GFR-binding peptide
EPLTILYYIGKTPKIEQLSNVGRTPKV

SEQ ID NO: 99000 - protein, 27 aa, Artificial Sequence
  Cyclic GFR-binding peptide
SPISILFIVGRKPKVYKQYEVGRTPKV

SEQ ID NO: 99001 - protein, 27 aa, Artificial Sequence
  Cyclic GFR-binding peptide
NAISILYFDSANNVVLKKYRVGRTPKV

SEQ ID NO: 99002 - protein, 27 aa, Artificial Sequence
  Cyclic GFR-binding peptide
EPLTVLYYDDSSNVIEQLSNVGRTPKV

SEQ ID NO: 99003 - protein, 29 aa, Artificial Sequence
  Cyclic GFR-binding peptide
VGRTPKVVTAKKLKPKKRVYEIKRVQVPR

SEQ ID NO: 99004 - protein, 29 aa, Artificial Sequence
  Cyclic GFR-binding peptide
VGRTPKVVQVEKLKPKKRVYEVKAVKVSR

SEQ ID NO: 99005 - protein, 29 aa, Artificial Sequence
  Cyclic GFR-binding peptide
VGRTPKVVQVEKFIPKKRVIEVKAVKVSR

SEQ ID NO: 99006 - protein, 29 aa, Artificial Sequence
  Cyclic GFR-binding peptide
VGRTPKVVQVEKHQGQHPKIRVKAMKVSR

SEQ ID NO: 99007 - protein, 29 aa, Artificial Sequence
  Cyclic GFR-binding peptide
VGRTPKVVTAKKHQGQHPKIRIKRMQVPR

SEQ ID NO: 99008 - protein, 29 aa, Artificial Sequence
  Cyclic GFR-binding peptide
VGRTPKVSMEGLLKPKKRVYEMIQVTINS

SEQ ID NO: 99009 - protein, 29 aa, Artificial Sequence
  Cyclic GFR-binding peptide
VGRTPKVSMEGIFIPKKRVIEMIQVTINS

SEQ ID NO: 99010 - protein, 29 aa, Artificial Sequence
  Cyclic GFR-binding peptide
VGRTPKVSMEGLHQGQHPKIRMIQMTINS

SEQ ID NO: 99011 - protein, 29 aa, Artificial Sequence
  Cyclic GFR-binding peptide
VGRTPKVSMEGILKPKKRVYEMIQVTINS

SEQ ID NO: 99012 - protein, 29 aa, Artificial Sequence
  Cyclic GFR-binding peptide
VGRTPKVSMEGLFIPKKRVIEMIQVTINS

SEQ ID NO: 99013 - protein, 29 aa, Artificial Sequence
  Cyclic GFR-binding peptide
VGRTPKVVTAKKFIPKKRVIEIKRVQVPR

SEQ ID NO: 99014 - protein, 29 aa, Artificial Sequence
  Cyclic GFR-binding peptide
VGRTPKVSMEGIHQGQHPKIRMIQMTINS

SEQ ID NO: 99015 - protein, 29 aa, Artificial Sequence
  Cyclic GFR-binding peptide
RPVQVRKIEYVRKKPKLKKATVVGRTPKV

SEQ ID NO: 99016 - protein, 29 aa, Artificial Sequence
  Cyclic GFR-binding peptide
RSVKVAKVEYVRKKPKLKEVQVVGRTPKV

SEQ ID NO: 99017 - protein, 29 aa, Artificial Sequence
  Cyclic GFR-binding peptide
RSVKVAKVEIVRKKPIFKEVQVVGRTPKV

SEQ ID NO: 99018 - protein, 29 aa, Artificial Sequence
  Cyclic GFR-binding peptide
RSVKMAKVRIKPHQGQHKEVQVVGRTPKV

SEQ ID NO: 99019 - protein, 29 aa, Artificial Sequence
  Cyclic GFR-binding peptide
RPVQMRKIRIKPHQGQHKKATVVGRTPKV

SEQ ID NO: 99020 - protein, 29 aa, Artificial Sequence
  Cyclic GFR-binding peptide
SNITVQIMEYVRKKPKLLGEMSVGRTPKV

SEQ ID NO: 99021 - protein, 29 aa, Artificial Sequence
  Cyclic GFR-binding peptide
SNITVQIMEIVRKKPIFIGEMSVGRTPKV

SEQ ID NO: 99022 - protein, 29 aa, Artificial Sequence
  Cyclic GFR-binding peptide
SNITMQIMRIKPHQGQHLGEMSVGRTPKV

SEQ ID NO: 99023 - protein, 29 aa, Artificial Sequence
  Cyclic GFR-binding peptide
SNITVQIMEYVRKKPKLIGEMSVGRTPKV

SEQ ID NO: 99024 - protein, 29 aa, Artificial Sequence
  Cyclic GFR-binding peptide
SNITVQIMEIVRKKPIFLGEMSVGRTPKV

SEQ ID NO: 99025 - protein, 29 aa, Artificial Sequence
  Cyclic GFR-binding peptide
RPVQVRKIEIVRKKPIFKKATVVGRTPKV

SEQ ID NO: 99026 - protein, 29 aa, Artificial Sequence
  Cyclic GFR-binding peptide
SNITMQIMRIKPHQGQHIGEMSVGRTPKV

SEQ ID NO: 99027 - protein, 27 aa, Artificial Sequence
  Cyclic GFR-binding peptide
VGRTPKVEYKFKVKPTRGVLYLISIPE

SEQ ID NO: 99028 - protein, 27 aa, Artificial Sequence
  Cyclic GFR-binding peptide
VGRTPKVEYKFKTPVGMDDLYLVSIPE

SEQ ID NO: 99029 - protein, 27 aa, Artificial Sequence
  Cyclic GFR-binding peptide
VGRTPKVEYQKYVKPKRGVIYLISIPS

SEQ ID NO: 99030 - protein, 27 aa, Artificial Sequence
  Cyclic GFR-binding peptide
VGRTPKVEYQKYVVKDYEDIYLMSIPS

SEQ ID NO: 99031 - protein, 27 aa, Artificial Sequence
  Cyclic GFR-binding peptide
VGRTPKVEYKFKIKPTKGILYLISIPE

SEQ ID NO: 99032 - protein, 27 aa, Artificial Sequence
  Cyclic GFR-binding peptide
VGRTPKVYHYKLYTVVGKDKYLISIPS

SEQ ID NO: 99033 - protein, 27 aa, Artificial Sequence
  Cyclic GFR-binding peptide
VGRTPKVRYKKLYTVVGKDFYLISIAN

SEQ ID NO: 99034 - protein, 27 aa, Artificial Sequence
  Cyclic GFR-binding peptide
VGRTPKVEYQKYVVNNAADIYLISIPS

SEQ ID NO: 99035 - protein, 27 aa, Artificial Sequence
  Cyclic GFR-binding peptide
VGRTPKVEYQKYVKPTRGVIYLISIPS

SEQ ID NO: 99036 - protein, 27 aa, Artificial Sequence
  Cyclic GFR-binding peptide
VGRTPKVEYQKYTPVGMDDIYLVSIPS

SEQ ID NO: 99037 - protein, 27 aa, Artificial Sequence
  Cyclic GFR-binding peptide
VGRTPKVEYKFKVVKDYEDLYLMSIPE

SEQ ID NO: 99038 - protein, 27 aa, Artificial Sequence
  Cyclic GFR-binding peptide
VGRTPKVEYKFKVVNNAADLYLISIPE

SEQ ID NO: 99039 - protein, 27 aa, Artificial Sequence
  Cyclic GFR-binding peptide
VGRTPKVEYQKYVVKENEDIYLMSIPS

SEQ ID NO: 99040 - protein, 27 aa, Artificial Sequence
  Cyclic GFR-binding peptide
VGRTPKVEYQKYIKPTKGIIYLISIPS

SEQ ID NO: 99041 - protein, 27 aa, Artificial Sequence
  Cyclic GFR-binding peptide
VGRTPKVRYKKLVVNNAADFYLISIAN

SEQ ID NO: 99042 - protein, 27 aa, Artificial Sequence
  Cyclic GFR-binding peptide
VGRTPKVYHYKLVVNNAADKYLISIPS

SEQ ID NO: 99043 - protein, 27 aa, Artificial Sequence
  Cyclic GFR-binding peptide
VGRTPKVEYKFKIVNNSSDLYLVSIPE

SEQ ID NO: 99044 - protein, 27 aa, Artificial Sequence
  Cyclic GFR-binding peptide
VGRTPKVEYQKYIVNSSDDIYLVSIPS

SEQ ID NO: 99045 - protein, 27 aa, Artificial Sequence
  Cyclic GFR-binding peptide
VGRTPKVEYKFKIVNSSDDLYLVSIPE

SEQ ID NO: 99046 - protein, 27 aa, Artificial Sequence
  Cyclic GFR-binding peptide
VGRTPKVEYKFKVKPKRGVLYLISIPE

SEQ ID NO: 99047 - protein, 27 aa, Artificial Sequence
  Cyclic GFR-binding peptide
VGRTPKVEYQKYYTVVGKDIYLISIPS

SEQ ID NO: 99048 - protein, 27 aa, Artificial Sequence
  Cyclic GFR-binding peptide
VGRTPKVEYKFKVVKENEDLYLMSIPE

SEQ ID NO: 99049 - protein, 27 aa, Artificial Sequence
  Cyclic GFR-binding peptide
VGRTPKVEYQKYIVNNSSDIYLVSIPS

SEQ ID NO: 99050 - protein, 27 aa, Artificial Sequence
  Cyclic GFR-binding peptide
VGRTPKVEYKFKYTVVGKDLYLISIPE

SEQ ID NO: 99051 - protein, 27 aa, Artificial Sequence
  Cyclic GFR-binding peptide
EPISILYLVGRTPKVKFKYEVGRTPKV

SEQ ID NO: 99052 - protein, 27 aa, Artificial Sequence
  Cyclic GFR-binding peptide
EPISVLYLDDMGVPTKFKYEVGRTPKV

SEQ ID NO: 99053 - protein, 27 aa, Artificial Sequence
  Cyclic GFR-binding peptide
SPISILYIVGRKPKVYKQYEVGRTPKV

SEQ ID NO: 99054 - protein, 27 aa, Artificial Sequence
  Cyclic GFR-binding peptide
SPISMLYIDEYDKVVYKQYEVGRTPKV

SEQ ID NO: 99055 - protein, 27 aa, Artificial Sequence
  Cyclic GFR-binding peptide
EPISILYLIGKTPKIKFKYEVGRTPKV

SEQ ID NO: 99056 - protein, 27 aa, Artificial Sequence
  Cyclic GFR-binding peptide
SPISILYKDKGVVTYLKYHYVGRTPKV

SEQ ID NO: 99057 - protein, 27 aa, Artificial Sequence
  Cyclic GFR-binding peptide
NAISILYFDKGVVTYLKKYRVGRTPKV

SEQ ID NO: 99058 - protein, 27 aa, Artificial Sequence
  Cyclic GFR-binding peptide
SPISILYIDAANNVVYKQYEVGRTPKV

SEQ ID NO: 99059 - protein, 27 aa, Artificial Sequence
  Cyclic GFR-binding peptide
SPISILYIVGRTPKVYKQYEVGRTPKV

SEQ ID NO: 99060 - protein, 27 aa, Artificial Sequence
  Cyclic GFR-binding peptide
SPISVLYIDDMGVPTYKQYEVGRTPKV

SEQ ID NO: 99061 - protein, 27 aa, Artificial Sequence
  Cyclic GFR-binding peptide
EPISMLYLDEYDKVVKFKYEVGRTPKV

SEQ ID NO: 99062 - protein, 27 aa, Artificial Sequence
  Cyclic GFR-binding peptide
EPISILYLDAANNVVKFKYEVGRTPKV

SEQ ID NO: 99063 - protein, 27 aa, Artificial Sequence
  Cyclic GFR-binding peptide
SPISMLYIDENEKVVYKQYEVGRTPKV

SEQ ID NO: 99064 - protein, 27 aa, Artificial Sequence
  Cyclic GFR-binding peptide
SPISILYIIGKTPKIYKQYEVGRTPKV

SEQ ID NO: 99065 - protein, 27 aa, Artificial Sequence
  Cyclic GFR-binding peptide
NAISILYFDAANNVVLKKYRVGRTPKV

SEQ ID NO: 99066 - protein, 27 aa, Artificial Sequence
  Cyclic GFR-binding peptide
SPISILYKDAANNVVLKYHYVGRTPKV

SEQ ID NO: 99067 - protein, 27 aa, Artificial Sequence
  Cyclic GFR-binding peptide
EPISVLYLDSSNNVIKFKYEVGRTPKV

SEQ ID NO: 99068 - protein, 27 aa, Artificial Sequence
  Cyclic GFR-binding peptide
SPISVLYIDDSSNVIYKQYEVGRTPKV

SEQ ID NO: 99069 - protein, 27 aa, Artificial Sequence
  Cyclic GFR-binding peptide
EPISVLYLDDSSNVIKFKYEVGRTPKV

SEQ ID NO: 99070 - protein, 27 aa, Artificial Sequence
  Cyclic GFR-binding peptide
EPISILYLVGRKPKVKFKYEVGRTPKV

SEQ ID NO: 99071 - protein, 27 aa, Artificial Sequence
  Cyclic GFR-binding peptide
SPISILYIDKGVVTYYKQYEVGRTPKV

SEQ ID NO: 99072 - protein, 27 aa, Artificial Sequence
  Cyclic GFR-binding peptide
EPISMLYLDENEKVVKFKYEVGRTPKV

SEQ ID NO: 99073 - protein, 27 aa, Artificial Sequence
  Cyclic GFR-binding peptide
SPISVLYIDSSNNVIYKQYEVGRTPKV

SEQ ID NO: 99074 - protein, 27 aa, Artificial Sequence
  Cyclic GFR-binding peptide
EPISILYLDKGVVTYKFKYEVGRTPKV

SEQ ID NO: 99075 - protein, 27 aa, Artificial Sequence
  Cyclic GFR-binding peptide
VGRTPKVPIKGYIIQQKDNFYLMNIPS

SEQ ID NO: 99076 - protein, 27 aa, Artificial Sequence
  Cyclic GFR-binding peptide
VGRTPKVPIKGYVVKDYEDFYLMNIPS

SEQ ID NO: 99077 - protein, 27 aa, Artificial Sequence
  Cyclic GFR-binding peptide
VGRTPKVPIKGYIVNSSDDFYLVNIPS

SEQ ID NO: 99078 - protein, 27 aa, Artificial Sequence
  Cyclic GFR-binding peptide
VGRTPKVPIKGYVVNNAADFYLINIPS

SEQ ID NO: 99079 - protein, 27 aa, Artificial Sequence
  Cyclic GFR-binding peptide
VGRTPKVPIKGYYTVVGKDFYLINIPS

SEQ ID NO: 99080 - protein, 27 aa, Artificial Sequence
  Cyclic GFR-binding peptide
VGRTPKVPIKGYLLVRGNDFYLMNIPS

SEQ ID NO: 99081 - protein, 27 aa, Artificial Sequence
  Cyclic GFR-binding peptide
VGRTPKVPIKGYVVKENEDFYLMNIPS

SEQ ID NO: 99082 - protein, 27 aa, Artificial Sequence
  Cyclic GFR-binding peptide
VGRTPKVPIKGYVVNNASDFYLINIPS

SEQ ID NO: 99083 - protein, 27 aa, Artificial Sequence
  Cyclic GFR-binding peptide
VGRTPKVPIKGYTPVGMDDFYLVNIPS

SEQ ID NO: 99084 - protein, 27 aa, Artificial Sequence
  Cyclic GFR-binding peptide
VGRTPKVPIKGYIVNNSSDFYLVNIPS

SEQ ID NO: 99085 - protein, 27 aa, Artificial Sequence
  Cyclic GFR-binding peptide
SPINMLYFNDKQQIIYGKIPVGRTPKV

SEQ ID NO: 99086 - protein, 27 aa, Artificial Sequence
  Cyclic GFR-binding peptide
SPINMLYFDEYDKVVYGKIPVGRTPKV

SEQ ID NO: 99087 - protein, 27 aa, Artificial Sequence
  Cyclic GFR-binding peptide
SPINVLYFDDSSNVIYGKIPVGRTPKV

SEQ ID NO: 99088 - protein, 27 aa, Artificial Sequence
  Cyclic GFR-binding peptide
SPINILYFDAANNVVYGKIPVGRTPKV

SEQ ID NO: 99089 - protein, 27 aa, Artificial Sequence
  Cyclic GFR-binding peptide
SPINILYFDKGVVTYYGKIPVGRTPKV

SEQ ID NO: 99090 - protein, 27 aa, Artificial Sequence
  Cyclic GFR-binding peptide
SPINMLYFDNGRVLLYGKIPVGRTPKV

SEQ ID NO: 99091 - protein, 27 aa, Artificial Sequence
  Cyclic GFR-binding peptide
SPINMLYFDENEKVVYGKIPVGRTPKV

SEQ ID NO: 99092 - protein, 27 aa, Artificial Sequence
  Cyclic GFR-binding peptide
SPINILYFDSANNVVYGKIPVGRTPKV

SEQ ID NO: 99093 - protein, 27 aa, Artificial Sequence
  Cyclic GFR-binding peptide
SPINVLYFDDMGVPTYGKIPVGRTPKV

SEQ ID NO: 99094 - protein, 27 aa, Artificial Sequence
  Cyclic GFR-binding peptide
SPINVLYFDSSNNVIYGKIPVGRTPKV

SEQ ID NO: 99095 - protein, 27 aa, Artificial Sequence
  Cyclic GFR-binding peptide
VGRTPKVEYQKYVVNNASDIYLISIPS

SEQ ID NO: 99096 - protein, 27 aa, Artificial Sequence
  Cyclic GFR-binding peptide
VGRTPKVEYQKYIIQQKDNIYLMSIPS

SEQ ID NO: 99097 - protein, 27 aa, Artificial Sequence
  Cyclic GFR-binding peptide
VGRTPKVEYQKYLLVRGNDIYLMSIPS

SEQ ID NO: 99098 - protein, 27 aa, Artificial Sequence
  Cyclic GFR-binding peptide
SPISILYIDSANNVVYKQYEVGRTPKV

SEQ ID NO: 99099 - protein, 27 aa, Artificial Sequence
  Cyclic GFR-binding peptide
SPISMLYINDKQQIIYKQYEVGRTPKV

SEQ ID NO: 99100 - protein, 27 aa, Artificial Sequence
  Cyclic GFR-binding peptide
SPISMLYIDNGRVLLYKQYEVGRTPKV

SEQ ID NO: 99101 - protein, 27 aa, Artificial Sequence
  Cyclic GFR-binding peptide
VGRTPKVPYVKLYTVVGKDFFLISLSS

SEQ ID NO: 99102 - protein, 27 aa, Artificial Sequence
  Cyclic GFR-binding peptide
VGRTPKVPYVKLIKPTKGIFFLISLSS

SEQ ID NO: 99103 - protein, 27 aa, Artificial Sequence
  Cyclic GFR-binding peptide
VGRTPKVPYVKLIIQQKDNFFLMSLSS

SEQ ID NO: 99104 - protein, 27 aa, Artificial Sequence
  Cyclic GFR-binding peptide
VGRTPKVPYVKLIVNSSDDFFLVSLSS

SEQ ID NO: 99105 - protein, 27 aa, Artificial Sequence
  Cyclic GFR-binding peptide
VGRTPKVPYVKLVKPKRGVFFLISLSS

SEQ ID NO: 99106 - protein, 27 aa, Artificial Sequence
  Cyclic GFR-binding peptide
VGRTPKVPYVKLVKPTRGVFFLISLSS

SEQ ID NO: 99107 - protein, 27 aa, Artificial Sequence
  Cyclic GFR-binding peptide
VGRTPKVPYVKLTPVGMDDFFLVSLSS

SEQ ID NO: 99108 - protein, 29 aa, Artificial Sequence
  Cyclic GFR-binding peptide
VGRTPKVPYVKLHQGQHPKIRFFLMSLSS

SEQ ID NO: 99109 - protein, 27 aa, Artificial Sequence
  Cyclic GFR-binding peptide
VGRTPKVPYVKLVVNKNEDFFLISLSS

SEQ ID NO: 99110 - protein, 27 aa, Artificial Sequence
  Cyclic GFR-binding peptide
VGRTPKVPYVKLVVNNASDFFLISLSS

SEQ ID NO: 99111 - protein, 27 aa, Artificial Sequence
  Cyclic GFR-binding peptide
VGRTPKVPYVKLVVKENEDFFLMSLSS

SEQ ID NO: 99112 - protein, 27 aa, Artificial Sequence
  Cyclic GFR-binding peptide
VGRTPKVPYVKLIVNNSSDFFLVSLSS

SEQ ID NO: 99113 - protein, 29 aa, Artificial Sequence
  Cyclic GFR-binding peptide
VGRTPKVPYVKLLKPKKRVYEFFLVSLSS

SEQ ID NO: 99114 - protein, 27 aa, Artificial Sequence
  Cyclic GFR-binding peptide
VGRTPKVPYVKLLLVRGNDFFLMSLSS

SEQ ID NO: 99115 - protein, 27 aa, Artificial Sequence
  Cyclic GFR-binding peptide
VGRTPKVPYVKLVVKDYEDFFLMSLSS

SEQ ID NO: 99116 - protein, 27 aa, Artificial Sequence
  Cyclic GFR-binding peptide
VGRTPKVPYVKLVVNNAADFFLISLSS

SEQ ID NO: 99117 - protein, 27 aa, Artificial Sequence
  Cyclic GFR-binding peptide
SSLSILFFDKGVVTYLKVYPVGRTPKV

SEQ ID NO: 99118 - protein, 27 aa, Artificial Sequence
  Cyclic GFR-binding peptide
SSLSILFFIGKTPKILKVYPVGRTPKV

SEQ ID NO: 99119 - protein, 27 aa, Artificial Sequence
  Cyclic GFR-binding peptide
SSLSMLFFNDKQQIILKVYPVGRTPKV

SEQ ID NO: 99120 - protein, 27 aa, Artificial Sequence
  Cyclic GFR-binding peptide
SSLSVLFFDDSSNVILKVYPVGRTPKV

SEQ ID NO: 99121 - protein, 27 aa, Artificial Sequence
  Cyclic GFR-binding peptide
SSLSILFFVGRKPKVLKVYPVGRTPKV

SEQ ID NO: 99122 - protein, 27 aa, Artificial Sequence
  Cyclic GFR-binding peptide
SSLSILFFVGRTPKVLKVYPVGRTPKV

SEQ ID NO: 99123 - protein, 27 aa, Artificial Sequence
  Cyclic GFR-binding peptide
SSLSVLFFDDMGVPTLKVYPVGRTPKV

SEQ ID NO: 99124 - protein, 29 aa, Artificial Sequence
  Cyclic GFR-binding peptide
SSLSMLFFRIKPHQGQHLKVYPVGRTPKV

SEQ ID NO: 99125 - protein, 27 aa, Artificial Sequence
  Cyclic GFR-binding peptide
SSLSILFFDENKNVVLKVYPVGRTPKV

SEQ ID NO: 99126 - protein, 27 aa, Artificial Sequence
  Cyclic GFR-binding peptide
SSLSILFFDSANNVVLKVYPVGRTPKV

SEQ ID NO: 99127 - protein, 27 aa, Artificial Sequence
  Cyclic GFR-binding peptide
SSLSMLFFDENEKVVLKVYPVGRTPKV

SEQ ID NO: 99128 - protein, 27 aa, Artificial Sequence
  Cyclic GFR-binding peptide
SSLSVLFFDSSNNVILKVYPVGRTPKV

SEQ ID NO: 99129 - protein, 29 aa, Artificial Sequence
  Cyclic GFR-binding peptide
SSLSVLFFEYVRKKPKLLKVYPVGRTPKV

SEQ ID NO: 99130 - protein, 27 aa, Artificial Sequence
  Cyclic GFR-binding peptide
SSLSMLFFDNGRVLLLKVYPVGRTPKV

SEQ ID NO: 99131 - protein, 27 aa, Artificial Sequence
  Cyclic GFR-binding peptide
SSLSMLFFDEYDKVVLKVYPVGRTPKV

SEQ ID NO: 99132 - protein, 27 aa, Artificial Sequence
  Cyclic GFR-binding peptide
SSLSILFFDAANNVVLKVYPVGRTPKV

SEQ ID NO: 99133 - protein, 27 aa, Artificial Sequence
  Cyclic GFR-binding peptide
VGRTPKVSMEGIIVNSSDDMIQVTINS

SEQ ID NO: 99134 - protein, 27 aa, Artificial Sequence
  Cyclic GFR-binding peptide
VGRTPKVVTAKKVVKENEDIKRMQVPR

SEQ ID NO: 99135 - protein, 27 aa, Artificial Sequence
  Cyclic GFR-binding peptide
VGRTPKVSMEGIVVKDYEDMIQMTINS

SEQ ID NO: 99136 - protein, 27 aa, Artificial Sequence
  Cyclic GFR-binding peptide
VGRTPKVVTAKKIKPTKGIIKRIQVPR

SEQ ID NO: 99137 - protein, 27 aa, Artificial Sequence
  Cyclic GFR-binding peptide
VGRTPKVSMEGIVKPTRGVMIQITINS

SEQ ID NO: 99138 - protein, 29 aa, Artificial Sequence
  Cyclic GFR-binding peptide
VGRTPKVNSLQEFIPKKRVIEYYVVPLPE

SEQ ID NO: 99139 - protein, 27 aa, Artificial Sequence
  Cyclic GFR-binding peptide
VGRTPKVVQVEKVKPKRGVVKAIKVSR

SEQ ID NO: 99140 - protein, 27 aa, Artificial Sequence
  Cyclic GFR-binding peptide
VGRTPKVVQVEKVVKENEDVKAMKVSR

SEQ ID NO: 99141 - protein, 27 aa, Artificial Sequence
  Cyclic GFR-binding peptide
VGRTPKVVTAKKIVNSSDDIKRVQVPR

SEQ ID NO: 99142 - protein, 27 aa, Artificial Sequence
  Cyclic GFR-binding peptide
VGRTPKVVQVEKIKPTKGIVKAIKVSR

SEQ ID NO: 99143 - protein, 29 aa, Artificial Sequence
  Cyclic GFR-binding peptide
VGRTPKVNSLQEFIPKKRVIEYYLVTLPE

SEQ ID NO: 99144 - protein, 27 aa, Artificial Sequence
  Cyclic GFR-binding peptide
VGRTPKVVQVEKIVNSSDDVKAVKVSR

SEQ ID NO: 99145 - protein, 27 aa, Artificial Sequence
  Cyclic GFR-binding peptide
VGRTPKVVTAKKVKPKRGVIKRIQVPR

SEQ ID NO: 99146 - protein, 27 aa, Artificial Sequence
  Cyclic GFR-binding peptide
VGRTPKVVQVEKVKPTRGVVKAIKVSR

SEQ ID NO: 99147 - protein, 27 aa, Artificial Sequence
  Cyclic GFR-binding peptide
VGRTPKVVTAKKVKPTRGVIKRIQVPR

SEQ ID NO: 99148 - protein, 29 aa, Artificial Sequence
  Cyclic GFR-binding peptide
VGRTPKVNSLQELKPKKRVYEYYLVTLPE

SEQ ID NO: 99149 - protein, 27 aa, Artificial Sequence
  Cyclic GFR-binding peptide
VGRTPKVSMEGIVKPKRGVMIQITINS

SEQ ID NO: 99150 - protein, 27 aa, Artificial Sequence
  Cyclic GFR-binding peptide
VGRTPKVSMEGIVVKENEDMIQMTINS

SEQ ID NO: 99151 - protein, 27 aa, Artificial Sequence
  Cyclic GFR-binding peptide
VGRTPKVSMEGIIKPTKGIMIQITINS

SEQ ID NO: 99152 - protein, 29 aa, Artificial Sequence
  Cyclic GFR-binding peptide
VGRTPKVNSLQEHQGQHPKIRYYLMTLPE

SEQ ID NO: 99153 - protein, 27 aa, Artificial Sequence
  Cyclic GFR-binding peptide
VGRTPKVVTAKKVVKDYEDIKRMQVPR

SEQ ID NO: 99154 - protein, 29 aa, Artificial Sequence
  Cyclic GFR-binding peptide
VGRTPKVNSLQEHQGQHPKIRYYVMPLPE

SEQ ID NO: 99155 - protein, 29 aa, Artificial Sequence
  Cyclic GFR-binding peptide
VGRTPKVNSLQELKPKKRVYEYYVVPLPE

SEQ ID NO: 99156 - protein, 27 aa, Artificial Sequence
  Cyclic GFR-binding peptide
VGRTPKVVQVEKVVKDYEDVKAMKVSR

SEQ ID NO: 99157 - protein, 27 aa, Artificial Sequence
  Cyclic GFR-binding peptide
SNITVQIMDDSSNVIIGEMSVGRTPKV

SEQ ID NO: 99158 - protein, 27 aa, Artificial Sequence
  Cyclic GFR-binding peptide
RPVQMRKIDENEKVVKKATVVGRTPKV

SEQ ID NO: 99159 - protein, 27 aa, Artificial Sequence
  Cyclic GFR-binding peptide
SNITMQIMDEYDKVVIGEMSVGRTPKV

SEQ ID NO: 99160 - protein, 27 aa, Artificial Sequence
  Cyclic GFR-binding peptide
RPVQIRKIIGKTPKIKKATVVGRTPKV

SEQ ID NO: 99161 - protein, 27 aa, Artificial Sequence
  Cyclic GFR-binding peptide
SNITIQIMVGRTPKVIGEMSVGRTPKV

SEQ ID NO: 99162 - protein, 29 aa, Artificial Sequence
  Cyclic GFR-binding peptide
EPLPVVYYEIVRKKPIFEQLSNVGRTPKV

SEQ ID NO: 99163 - protein, 27 aa, Artificial Sequence
  Cyclic GFR-binding peptide
RSVKIAKVVGRKPKVKEVQVVGRTPKV

SEQ ID NO: 99164 - protein, 27 aa, Artificial Sequence
  Cyclic GFR-binding peptide
RSVKMAKVDENEKVVKEVQVVGRTPKV

SEQ ID NO: 99165 - protein, 27 aa, Artificial Sequence
  Cyclic GFR-binding peptide
RPVQVRKIDDSSNVIKKATVVGRTPKV

SEQ ID NO: 99166 - protein, 27 aa, Artificial Sequence
  Cyclic GFR-binding peptide
RSVKIAKVIGKTPKIKEVQVVGRTPKV

SEQ ID NO: 99167 - protein, 29 aa, Artificial Sequence
  Cyclic GFR-binding peptide
EPLTVLYYEIVRKKPIFEQLSNVGRTPKV

SEQ ID NO: 99168 - protein, 27 aa, Artificial Sequence
  Cyclic GFR-binding peptide
RSVKVAKVDDSSNVIKEVQVVGRTPKV

SEQ ID NO: 99169 - protein, 27 aa, Artificial Sequence
  Cyclic GFR-binding peptide
RPVQIRKIVGRKPKVKKATVVGRTPKV

SEQ ID NO: 99170 - protein, 27 aa, Artificial Sequence
  Cyclic GFR-binding peptide
RSVKIAKVVGRTPKVKEVQVVGRTPKV

SEQ ID NO: 99171 - protein, 27 aa, Artificial Sequence
  Cyclic GFR-binding peptide
RPVQIRKIVGRTPKVKKATVVGRTPKV

SEQ ID NO: 99172 - protein, 29 aa, Artificial Sequence
  Cyclic GFR-binding peptide
EPLTVLYYEYVRKKPKLEQLSNVGRTPKV

SEQ ID NO: 99173 - protein, 27 aa, Artificial Sequence
  Cyclic GFR-binding peptide
SNITIQIMVGRKPKVIGEMSVGRTPKV

SEQ ID NO: 99174 - protein, 27 aa, Artificial Sequence
  Cyclic GFR-binding peptide
SNITMQIMDENEKVVIGEMSVGRTPKV

SEQ ID NO: 99175 - protein, 27 aa, Artificial Sequence
  Cyclic GFR-binding peptide
SNITIQIMIGKTPKIIGEMSVGRTPKV

SEQ ID NO: 99176 - protein, 29 aa, Artificial Sequence
  Cyclic GFR-binding peptide
EPLTMLYYRIKPHQGQHEQLSNVGRTPKV

SEQ ID NO: 99177 - protein, 27 aa, Artificial Sequence
  Cyclic GFR-binding peptide
RPVQMRKIDEYDKVVKKATVVGRTPKV

SEQ ID NO: 99178 - protein, 29 aa, Artificial Sequence
  Cyclic GFR-binding peptide
EPLPMVYYRIKPHQGQHEQLSNVGRTPKV

SEQ ID NO: 99179 - protein, 29 aa, Artificial Sequence
  Cyclic GFR-binding peptide
EPLPVVYYEYVRKKPKLEQLSNVGRTPKV

SEQ ID NO: 99180 - protein, 27 aa, Artificial Sequence
  Cyclic GFR-binding peptide
RSVKMAKVDEYDKVVKEVQVVGRTPKV

SEQ ID NO: 99181 - protein, 27 aa, Artificial Sequence
  Cyclic GFR-binding peptide
VGRTPKVRYKKLIIQQKDNFYLMSIAN

SEQ ID NO: 99182 - protein, 27 aa, Artificial Sequence
  Cyclic GFR-binding peptide
VGRTPKVRYKKLLLVRGNDFYLMSIAN

SEQ ID NO: 99183 - protein, 27 aa, Artificial Sequence
  Cyclic GFR-binding peptide
NAISMLYFNDKQQIILKKYRVGRTPKV

SEQ ID NO: 99184 - protein, 27 aa, Artificial Sequence
  Cyclic GFR-binding peptide
NAISMLYFDNGRVLLLKKYRVGRTPKV

SEQ ID NO: 99185 - protein, 27 aa, Artificial Sequence
  Cyclic GFR-binding peptide
VGRTPKVEYKFKVVNKNEDLYLISIPE

SEQ ID NO: 99186 - protein, 27 aa, Artificial Sequence
  Cyclic GFR-binding peptide
VGRTPKVPIKGYVKPTRGVFYLINIPS

SEQ ID NO: 99187 - protein, 27 aa, Artificial Sequence
  Cyclic GFR-binding peptide
VGRTPKVEYKFKLLVRGNDLYLMSIPE

SEQ ID NO: 99188 - protein, 27 aa, Artificial Sequence
  Cyclic GFR-binding peptide
VGRTPKVYHYKLVVNKNEDKYLISIPS

SEQ ID NO: 99189 - protein, 27 aa, Artificial Sequence
  Cyclic GFR-binding peptide
VGRTPKVRHKRLLLVRGNDYYLMSTAS

SEQ ID NO: 99190 - protein, 27 aa, Artificial Sequence
  Cyclic GFR-binding peptide
VGRTPKVYHYKLLLVRGNDKYLMSIPS

SEQ ID NO: 99191 - protein, 27 aa, Artificial Sequence
  Cyclic GFR-binding peptide
VGRTPKVRHKRLVVNKNEDYYLISTAS

SEQ ID NO: 99192 - protein, 27 aa, Artificial Sequence
  Cyclic GFR-binding peptide
VGRTPKVRYKKLVVNKNEDFYLISIAN

SEQ ID NO: 99193 - protein, 27 aa, Artificial Sequence
  Cyclic GFR-binding peptide
VGRTPKVPIKGYVVNKNEDFYLINIPS

SEQ ID NO: 99194 - protein, 27 aa, Artificial Sequence
  Cyclic GFR-binding peptide
VGRTPKVPIKGYIKPTKGIFYLINIPS

SEQ ID NO: 99195 - protein, 27 aa, Artificial Sequence
  Cyclic GFR-binding peptide
VGRTPKVRHKRLYTVVGKDYYLISTAS

SEQ ID NO: 99196 - protein, 27 aa, Artificial Sequence
  Cyclic GFR-binding peptide
VGRTPKVEYKFKVVNNASDLYLISIPE

SEQ ID NO: 99197 - protein, 27 aa, Artificial Sequence
  Cyclic GFR-binding peptide
VGRTPKVRHKRLIIQQKDNYYLMSTAS

SEQ ID NO: 99198 - protein, 27 aa, Artificial Sequence
  Cyclic GFR-binding peptide
VGRTPKVEYKFKIIQQKDNLYLMSIPE

SEQ ID NO: 99199 - protein, 27 aa, Artificial Sequence
  Cyclic GFR-binding peptide
VGRTPKVPIKGYVKPKRGVFYLINIPS

SEQ ID NO: 99200 - protein, 27 aa, Artificial Sequence
  Cyclic GFR-binding peptide
VGRTPKVRHKRLVVNNASDYYLISTAS

SEQ ID NO: 99201 - protein, 27 aa, Artificial Sequence
  Cyclic GFR-binding peptide
VGRTPKVYHYKLVVNNASDKYLISIPS

SEQ ID NO: 99202 - protein, 27 aa, Artificial Sequence
  Cyclic GFR-binding peptide
VGRTPKVYHYKLIIQQKDNKYLMSIPS

SEQ ID NO: 99203 - protein, 27 aa, Artificial Sequence
  Cyclic GFR-binding peptide
VGRTPKVRHKRLVVNNAADYYLISTAS

SEQ ID NO: 99204 - protein, 27 aa, Artificial Sequence
  Cyclic GFR-binding peptide
EPISILYLDENKNVVKFKYEVGRTPKV

SEQ ID NO: 99205 - protein, 27 aa, Artificial Sequence
  Cyclic GFR-binding peptide
SPINILYFVGRTPKVYGKIPVGRTPKV

SEQ ID NO: 99206 - protein, 27 aa, Artificial Sequence
  Cyclic GFR-binding peptide
EPISMLYLDNGRVLLKFKYEVGRTPKV

SEQ ID NO: 99207 - protein, 27 aa, Artificial Sequence
  Cyclic GFR-binding peptide
SPISILYKDENKNVVLKYHYVGRTPKV

SEQ ID NO: 99208 - protein, 27 aa, Artificial Sequence
  Cyclic GFR-binding peptide
SATSMLYYDNGRVLLLRKHRVGRTPKV

SEQ ID NO: 99209 - protein, 27 aa, Artificial Sequence
  Cyclic GFR-binding peptide
SPISMLYKDNGRVLLLKYHYVGRTPKV

SEQ ID NO: 99210 - protein, 27 aa, Artificial Sequence
  Cyclic GFR-binding peptide
SATSILYYDENKNVVLRKHRVGRTPKV

SEQ ID NO: 99211 - protein, 27 aa, Artificial Sequence
  Cyclic GFR-binding peptide
NAISILYFDENKNVVLKKYRVGRTPKV

SEQ ID NO: 99212 - protein, 27 aa, Artificial Sequence
  Cyclic GFR-binding peptide
SPINILYFDENKNVVYGKIPVGRTPKV

SEQ ID NO: 99213 - protein, 27 aa, Artificial Sequence
  Cyclic GFR-binding peptide
SPINILYFIGKTPKIYGKIPVGRTPKV

SEQ ID NO: 99214 - protein, 27 aa, Artificial Sequence
  Cyclic GFR-binding peptide
SATSILYYDKGVVTYLRKHRVGRTPKV

SEQ ID NO: 99215 - protein, 27 aa, Artificial Sequence
  Cyclic GFR-binding peptide
EPISILYLDSANNVVKFKYEVGRTPKV

SEQ ID NO: 99216 - protein, 27 aa, Artificial Sequence
  Cyclic GFR-binding peptide
SATSMLYYNDKQQIILRKHRVGRTPKV

SEQ ID NO: 99217 - protein, 27 aa, Artificial Sequence
  Cyclic GFR-binding peptide
EPISMLYLNDKQQIIKFKYEVGRTPKV

SEQ ID NO: 99218 - protein, 27 aa, Artificial Sequence
  Cyclic GFR-binding peptide
SPINILYFVGRKPKVYGKIPVGRTPKV

SEQ ID NO: 99219 - protein, 27 aa, Artificial Sequence
  Cyclic GFR-binding peptide
SATSILYYDSANNVVLRKHRVGRTPKV

SEQ ID NO: 99220 - protein, 27 aa, Artificial Sequence
  Cyclic GFR-binding peptide
SPISILYKDSANNVVLKYHYVGRTPKV

SEQ ID NO: 99221 - protein, 27 aa, Artificial Sequence
  Cyclic GFR-binding peptide
SPISMLYKNDKQQIILKYHYVGRTPKV

SEQ ID NO: 99222 - protein, 27 aa, Artificial Sequence
  Cyclic GFR-binding peptide
SATSILYYDAANNVVLRKHRVGRTPKV

SEQ ID NO: 99223 - protein, 27 aa, Artificial Sequence
  Cyclic GFR-binding peptide
VGRTPKVSMEGIIIQQKDNMIQMTINS

SEQ ID NO: 99224 - protein, 27 aa, Artificial Sequence
  Cyclic GFR-binding peptide
VGRTPKVSMEGLVKPKRGVMIQITINS

SEQ ID NO: 99225 - protein, 27 aa, Artificial Sequence
  Cyclic GFR-binding peptide
VGRTPKVSMEGLVVNNASDMIQITINS

SEQ ID NO: 99226 - protein, 27 aa, Artificial Sequence
  Cyclic GFR-binding peptide
VGRTPKVSMEGILLVRGNDMIQMTINS

SEQ ID NO: 99227 - protein, 27 aa, Artificial Sequence
  Cyclic GFR-binding peptide
VGRTPKVSMEGLIKPTKGIMIQITINS

SEQ ID NO: 99228 - protein, 27 aa, Artificial Sequence
  Cyclic GFR-binding peptide
VGRTPKVSMEGLIVNSSDDMIQVTINS

SEQ ID NO: 99229 - protein, 27 aa, Artificial Sequence
  Cyclic GFR-binding peptide
VGRTPKVSMEGIVVNNASDMIQITINS

SEQ ID NO: 99230 - protein, 27 aa, Artificial Sequence
  Cyclic GFR-binding peptide
VGRTPKVSMEGLVVNNAADMIQITINS

SEQ ID NO: 99231 - protein, 27 aa, Artificial Sequence
  Cyclic GFR-binding peptide
VGRTPKVSMEGLLLVRGNDMIQMTINS

SEQ ID NO: 99232 - protein, 27 aa, Artificial Sequence
  Cyclic GFR-binding peptide
VGRTPKVSMEGLIIQQKDNMIQMTINS

SEQ ID NO: 99233 - protein, 27 aa, Artificial Sequence
  Cyclic GFR-binding peptide
VGRTPKVSMEGIVVNNAADMIQITINS

SEQ ID NO: 99234 - protein, 27 aa, Artificial Sequence
  Cyclic GFR-binding peptide
VGRTPKVSMEGLVKPTRGVMIQITINS

SEQ ID NO: 99235 - protein, 27 aa, Artificial Sequence
  Cyclic GFR-binding peptide
SNITMQIMNDKQQIIIGEMSVGRTPKV

SEQ ID NO: 99236 - protein, 27 aa, Artificial Sequence
  Cyclic GFR-binding peptide
SNITIQIMVGRKPKVLGEMSVGRTPKV

SEQ ID NO: 99237 - protein, 27 aa, Artificial Sequence
  Cyclic GFR-binding peptide
SNITIQIMDSANNVVLGEMSVGRTPKV

SEQ ID NO: 99238 - protein, 27 aa, Artificial Sequence
  Cyclic GFR-binding peptide
SNITMQIMDNGRVLLIGEMSVGRTPKV

SEQ ID NO: 99239 - protein, 27 aa, Artificial Sequence
  Cyclic GFR-binding peptide
SNITIQIMIGKTPKILGEMSVGRTPKV

SEQ ID NO: 99240 - protein, 27 aa, Artificial Sequence
  Cyclic GFR-binding peptide
SNITVQIMDDSSNVILGEMSVGRTPKV

SEQ ID NO: 99241 - protein, 27 aa, Artificial Sequence
  Cyclic GFR-binding peptide
SNITIQIMDSANNVVIGEMSVGRTPKV

SEQ ID NO: 99242 - protein, 27 aa, Artificial Sequence
  Cyclic GFR-binding peptide
SNITIQIMDAANNVVLGEMSVGRTPKV

SEQ ID NO: 99243 - protein, 27 aa, Artificial Sequence
  Cyclic GFR-binding peptide
SNITMQIMDNGRVLLLGEMSVGRTPKV

SEQ ID NO: 99244 - protein, 27 aa, Artificial Sequence
  Cyclic GFR-binding peptide
SNITMQIMNDKQQIILGEMSVGRTPKV

SEQ ID NO: 99245 - protein, 27 aa, Artificial Sequence
  Cyclic GFR-binding peptide
SNITIQIMDAANNVVIGEMSVGRTPKV

SEQ ID NO: 99246 - protein, 27 aa, Artificial Sequence
  Cyclic GFR-binding peptide
SNITIQIMVGRTPKVLGEMSVGRTPKV

SEQ ID NO: 99247 - protein, 27 aa, Artificial Sequence
  Cyclic GFR-binding peptide
VGRTPKVQYNKLVVNKNEDLYLISIAS

SEQ ID NO: 99248 - protein, 27 aa, Artificial Sequence
  Cyclic GFR-binding peptide
VGRTPKVQYNKLVVNNAADLYLISIAS

SEQ ID NO: 99249 - protein, 27 aa, Artificial Sequence
  Cyclic GFR-binding peptide
VGRTPKVQYNKLIIQQKDNLYLMSIAS

SEQ ID NO: 99250 - protein, 27 aa, Artificial Sequence
  Cyclic GFR-binding peptide
VGRTPKVQYNKLLLVRGNDLYLMSIAS

SEQ ID NO: 99251 - protein, 27 aa, Artificial Sequence
  Cyclic GFR-binding peptide
VGRTPKVQYNKLYTVVGKDLYLISIAS

SEQ ID NO: 99252 - protein, 27 aa, Artificial Sequence
  Cyclic GFR-binding peptide
SAISILYLDENKNVVLKNYQVGRTPKV

SEQ ID NO: 99253 - protein, 27 aa, Artificial Sequence
  Cyclic GFR-binding peptide
SAISILYLDAANNVVLKNYQVGRTPKV

SEQ ID NO: 99254 - protein, 27 aa, Artificial Sequence
  Cyclic GFR-binding peptide
SAISMLYLNDKQQIILKNYQVGRTPKV

SEQ ID NO: 99255 - protein, 27 aa, Artificial Sequence
  Cyclic GFR-binding peptide
SAISMLYLDNGRVLLLKNYQVGRTPKV

SEQ ID NO: 99256 - protein, 27 aa, Artificial Sequence
  Cyclic GFR-binding peptide
SAISILYLDKGVVTYLKNYQVGRTPKV

SEQ ID NO: 99257 - protein, 29 aa, Artificial Sequence
  Cyclic GFR-binding peptide
RIKPHQGQHRYKKLIKPTKGIFYLISIAN

SEQ ID NO: 99258 - protein, 31 aa, Artificial Sequence
  Cyclic GFR-binding peptide
RIKPHQGQHRHKRLFIPKKRVIEYYLVSTAS

SEQ ID NO: 99259 - protein, 29 aa, Artificial Sequence
  Cyclic GFR-binding peptide
RIKPHQGQHYHYKLVVKDYEDKYLMSIPS

SEQ ID NO: 99260 - protein, 29 aa, Artificial Sequence
  Cyclic GFR-binding peptide
RIKPHQGQHQYNKLIVNNSSDLYLVSIAS

SEQ ID NO: 99261 - protein, 29 aa, Artificial Sequence
  Cyclic GFR-binding peptide
RIKPHQGQHRYKKLVVKDYEDFYLMSIAN

SEQ ID NO: 99262 - protein, 29 aa, Artificial Sequence
  Cyclic GFR-binding peptide
RIKPHQGQHRYKKLVKPTRGVFYLISIAN

SEQ ID NO: 99263 - protein, 29 aa, Artificial Sequence
  Cyclic GFR-binding peptide
RIKPHQGQHRHKRLVVKENEDYYLMSTAS

SEQ ID NO: 99264 - protein, 29 aa, Artificial Sequence
  Cyclic GFR-binding peptide
RIKPHQGQHYHYKLIKPTKGIKYLISIPS

SEQ ID NO: 99265 - protein, 31 aa, Artificial Sequence
  Cyclic GFR-binding peptide
RIKPHQGQHRYKKLFIPKKRVIEFYLVSIAN

SEQ ID NO: 99266 - protein, 29 aa, Artificial Sequence
  Cyclic GFR-binding peptide
RIKPHQGQHYHYKLVVKENEDKYLMSIPS

SEQ ID NO: 99267 - protein, 29 aa, Artificial Sequence
  Cyclic GFR-binding peptide
RIKPHQGQHRHKRLVKPKRGVYYLISTAS

SEQ ID NO: 99268 - protein, 29 aa, Artificial Sequence
  Cyclic GFR-binding peptide
RIKPHQGQHYHYKLVKPKRGVKYLISIPS

SEQ ID NO: 99269 - protein, 31 aa, Artificial Sequence
  Cyclic GFR-binding peptide
RIKPHQGQHQYNKLFIPKKRVIELYLVSIAS

SEQ ID NO: 99270 - protein, 29 aa, Artificial Sequence
  Cyclic GFR-binding peptide
RIKPHQGQHQYNKLVKPTRGVLYLISIAS

SEQ ID NO: 99271 - protein, 29 aa, Artificial Sequence
  Cyclic GFR-binding peptide
RIKPHQGQHRYKKLVVKENEDFYLMSIAN

SEQ ID NO: 99272 - protein, 29 aa, Artificial Sequence
  Cyclic GFR-binding peptide
RIKPHQGQHQYNKLTPVGMDDLYLVSIAS

SEQ ID NO: 99273 - protein, 29 aa, Artificial Sequence
  Cyclic GFR-binding peptide
RIKPHQGQHRYKKLTPVGMDDFYLVSIAN

SEQ ID NO: 99274 - protein, 29 aa, Artificial Sequence
  Cyclic GFR-binding peptide
RIKPHQGQHRYKKLVKPKRGVFYLISIAN

SEQ ID NO: 99275 - protein, 29 aa, Artificial Sequence
  Cyclic GFR-binding peptide
RIKPHQGQHQYNKLVVKENEDLYLMSIAS

SEQ ID NO: 99276 - protein, 29 aa, Artificial Sequence
  Cyclic GFR-binding peptide
RIKPHQGQHYHYKLIVNSSDDKYLVSIPS

SEQ ID NO: 99277 - protein, 29 aa, Artificial Sequence
  Cyclic GFR-binding peptide
RIKPHQGQHQYNKLVKPKRGVLYLISIAS

SEQ ID NO: 99278 - protein, 29 aa, Artificial Sequence
  Cyclic GFR-binding peptide
RIKPHQGQHRYKKLIVNNSSDFYLVSIAN

SEQ ID NO: 99279 - protein, 29 aa, Artificial Sequence
  Cyclic GFR-binding peptide
RIKPHQGQHRYKKLIVNSSDDFYLVSIAN

SEQ ID NO: 99280 - protein, 29 aa, Artificial Sequence
  Cyclic GFR-binding peptide
RIKPHQGQHRHKRLVKPTRGVYYLISTAS

SEQ ID NO: 99281 - protein, 31 aa, Artificial Sequence
  Cyclic GFR-binding peptide
RIKPHQGQHYHYKLFIPKKRVIEKYLVSIPS

SEQ ID NO: 99282 - protein, 29 aa, Artificial Sequence
  Cyclic GFR-binding peptide
RIKPHQGQHRHKRLIKPTKGIYYLISTAS

SEQ ID NO: 99283 - protein, 29 aa, Artificial Sequence
  Cyclic GFR-binding peptide
RIKPHQGQHRHKRLTPVGMDDYYLVSTAS

SEQ ID NO: 99284 - protein, 29 aa, Artificial Sequence
  Cyclic GFR-binding peptide
RIKPHQGQHYHYKLTPVGMDDKYLVSIPS

SEQ ID NO: 99285 - protein, 29 aa, Artificial Sequence
  Cyclic GFR-binding peptide
RIKPHQGQHYHYKLIVNNSSDKYLVSIPS

SEQ ID NO: 99286 - protein, 29 aa, Artificial Sequence
  Cyclic GFR-binding peptide
RIKPHQGQHRHKRLIVNNSSDYYLVSTAS

SEQ ID NO: 99287 - protein, 29 aa, Artificial Sequence
  Cyclic GFR-binding peptide
RIKPHQGQHYHYKLVKPTRGVKYLISIPS

SEQ ID NO: 99288 - protein, 29 aa, Artificial Sequence
  Cyclic GFR-binding peptide
RIKPHQGQHRHKRLIVNSSDDYYLVSTAS

SEQ ID NO: 99289 - protein, 29 aa, Artificial Sequence
  Cyclic GFR-binding peptide
RIKPHQGQHRHKRLVVKDYEDYYLMSTAS

SEQ ID NO: 99290 - protein, 29 aa, Artificial Sequence
  Cyclic GFR-binding peptide
RIKPHQGQHQYNKLIKPTKGILYLISIAS

SEQ ID NO: 99291 - protein, 29 aa, Artificial Sequence
  Cyclic GFR-binding peptide
RIKPHQGQHQYNKLVVKDYEDLYLMSIAS

SEQ ID NO: 99292 - protein, 29 aa, Artificial Sequence
  Cyclic GFR-binding peptide
RIKPHQGQHQYNKLIVNSSDDLYLVSIAS

SEQ ID NO: 99293 - protein, 29 aa, Artificial Sequence
  Cyclic GFR-binding peptide
NAISILYFIGKTPKILKKYRRIKPHQGQH

SEQ ID NO: 99294 - protein, 31 aa, Artificial Sequence
  Cyclic GFR-binding peptide
SATSVLYYEIVRKKPIFLRKHRRIKPHQGQH

SEQ ID NO: 99295 - protein, 29 aa, Artificial Sequence
  Cyclic GFR-binding peptide
SPISMLYKDEYDKVVLKYHYRIKPHQGQH

SEQ ID NO: 99296 - protein, 29 aa, Artificial Sequence
  Cyclic GFR-binding peptide
SAISVLYLDSSNNVILKNYQRIKPHQGQH

SEQ ID NO: 99297 - protein, 29 aa, Artificial Sequence
  Cyclic GFR-binding peptide
NAISMLYFDEYDKVVLKKYRRIKPHQGQH

SEQ ID NO: 99298 - protein, 29 aa, Artificial Sequence
  Cyclic GFR-binding peptide
NAISILYFVGRTPKVLKKYRRIKPHQGQH

SEQ ID NO: 99299 - protein, 29 aa, Artificial Sequence
  Cyclic GFR-binding peptide
SATSMLYYDENEKVVLRKHRRIKPHQGQH

SEQ ID NO: 99300 - protein, 29 aa, Artificial Sequence
  Cyclic GFR-binding peptide
SPISILYKIGKTPKILKYHYRIKPHQGQH

SEQ ID NO: 99301 - protein, 31 aa, Artificial Sequence
  Cyclic GFR-binding peptide
NAISVLYFEIVRKKPIFLKKYRRIKPHQGQH

SEQ ID NO: 99302 - protein, 29 aa, Artificial Sequence
  Cyclic GFR-binding peptide
SPISMLYKDENEKVVLKYHYRIKPHQGQH

SEQ ID NO: 99303 - protein, 29 aa, Artificial Sequence
  Cyclic GFR-binding peptide
SATSILYYVGRKPKVLRKHRRIKPHQGQH

SEQ ID NO: 99304 - protein, 29 aa, Artificial Sequence
  Cyclic GFR-binding peptide
SPISILYKVGRKPKVLKYHYRIKPHQGQH

SEQ ID NO: 99305 - protein, 31 aa, Artificial Sequence
  Cyclic GFR-binding peptide
SAISVLYLEIVRKKPIFLKNYQRIKPHQGQH

SEQ ID NO: 99306 - protein, 29 aa, Artificial Sequence
  Cyclic GFR-binding peptide
SAISILYLVGRTPKVLKNYQRIKPHQGQH

SEQ ID NO: 99307 - protein, 29 aa, Artificial Sequence
  Cyclic GFR-binding peptide
NAISMLYFDENEKVVLKKYRRIKPHQGQH

SEQ ID NO: 99308 - protein, 29 aa, Artificial Sequence
  Cyclic GFR-binding peptide
SAISVLYLDDMGVPTLKNYQRIKPHQGQH

SEQ ID NO: 99309 - protein, 29 aa, Artificial Sequence
  Cyclic GFR-binding peptide
NAISVLYFDDMGVPTLKKYRRIKPHQGQH

SEQ ID NO: 99310 - protein, 29 aa, Artificial Sequence
  Cyclic GFR-binding peptide
NAISILYFVGRKPKVLKKYRRIKPHQGQH

SEQ ID NO: 99311 - protein, 29 aa, Artificial Sequence
  Cyclic GFR-binding peptide
SAISMLYLDENEKVVLKNYQRIKPHQGQH

SEQ ID NO: 99312 - protein, 29 aa, Artificial Sequence
  Cyclic GFR-binding peptide
SPISVLYKDDSSNVILKYHYRIKPHQGQH

SEQ ID NO: 99313 - protein, 29 aa, Artificial Sequence
  Cyclic GFR-binding peptide
SAISILYLVGRKPKVLKNYQRIKPHQGQH

SEQ ID NO: 99314 - protein, 29 aa, Artificial Sequence
  Cyclic GFR-binding peptide
NAISVLYFDSSNNVILKKYRRIKPHQGQH

SEQ ID NO: 99315 - protein, 29 aa, Artificial Sequence
  Cyclic GFR-binding peptide
NAISVLYFDDSSNVILKKYRRIKPHQGQH

SEQ ID NO: 99316 - protein, 29 aa, Artificial Sequence
  Cyclic GFR-binding peptide
SATSILYYVGRTPKVLRKHRRIKPHQGQH

SEQ ID NO: 99317 - protein, 31 aa, Artificial Sequence
  Cyclic GFR-binding peptide
SPISVLYKEIVRKKPIFLKYHYRIKPHQGQH

SEQ ID NO: 99318 - protein, 29 aa, Artificial Sequence
  Cyclic GFR-binding peptide
SATSILYYIGKTPKILRKHRRIKPHQGQH

SEQ ID NO: 99319 - protein, 29 aa, Artificial Sequence
  Cyclic GFR-binding peptide
SATSVLYYDDMGVPTLRKHRRIKPHQGQH

SEQ ID NO: 99320 - protein, 29 aa, Artificial Sequence
  Cyclic GFR-binding peptide
SPISVLYKDDMGVPTLKYHYRIKPHQGQH

SEQ ID NO: 99321 - protein, 29 aa, Artificial Sequence
  Cyclic GFR-binding peptide
SPISVLYKDSSNNVILKYHYRIKPHQGQH

SEQ ID NO: 99322 - protein, 29 aa, Artificial Sequence
  Cyclic GFR-binding peptide
SATSVLYYDSSNNVILRKHRRIKPHQGQH

SEQ ID NO: 99323 - protein, 29 aa, Artificial Sequence
  Cyclic GFR-binding peptide
SPISILYKVGRTPKVLKYHYRIKPHQGQH

SEQ ID NO: 99324 - protein, 29 aa, Artificial Sequence
  Cyclic GFR-binding peptide
SATSVLYYDDSSNVILRKHRRIKPHQGQH

SEQ ID NO: 99325 - protein, 29 aa, Artificial Sequence
  Cyclic GFR-binding peptide
SATSMLYYDEYDKVVLRKHRRIKPHQGQH

SEQ ID NO: 99326 - protein, 29 aa, Artificial Sequence
  Cyclic GFR-binding peptide
SAISILYLIGKTPKILKNYQRIKPHQGQH

SEQ ID NO: 99327 - protein, 29 aa, Artificial Sequence
  Cyclic GFR-binding peptide
SAISMLYLDEYDKVVLKNYQRIKPHQGQH

SEQ ID NO: 99328 - protein, 29 aa, Artificial Sequence
  Cyclic GFR-binding peptide
SAISVLYLDDSSNVILKNYQRIKPHQGQH

SEQ ID NO: 99329 - protein, 29 aa, Artificial Sequence
  Cyclic GFR-binding peptide
RIKPHQGQHNSLQEVVKDYEDYYLMTLPE

SEQ ID NO: 99330 - protein, 29 aa, Artificial Sequence
  Cyclic GFR-binding peptide
RIKPHQGQHNSLQEIKPTKGIYYVIPLPE

SEQ ID NO: 99331 - protein, 29 aa, Artificial Sequence
  Cyclic GFR-binding peptide
RIKPHQGQHNSLQEVKPKRGVYYLITLPE

SEQ ID NO: 99332 - protein, 29 aa, Artificial Sequence
  Cyclic GFR-binding peptide
RIKPHQGQHNSLQEVKPTRGVYYVIPLPE

SEQ ID NO: 99333 - protein, 29 aa, Artificial Sequence
  Cyclic GFR-binding peptide
RIKPHQGQHEYQKYIVNSSDDIFLVSIPS

SEQ ID NO: 99334 - protein, 29 aa, Artificial Sequence
  Cyclic GFR-binding peptide
RIKPHQGQHEYQKYVKPTRGVIFLISIPS

SEQ ID NO: 99335 - protein, 29 aa, Artificial Sequence
  Cyclic GFR-binding peptide
RIKPHQGQHNSLQEVVKENEDYYLMTLPE

SEQ ID NO: 99336 - protein, 29 aa, Artificial Sequence
  Cyclic GFR-binding peptide
RIKPHQGQHNSLQEVVNNASDYYLITLPE

SEQ ID NO: 99337 - protein, 29 aa, Artificial Sequence
  Cyclic GFR-binding peptide
RIKPHQGQHNSLQEVKPKRGVYYVIPLPE

SEQ ID NO: 99338 - protein, 29 aa, Artificial Sequence
  Cyclic GFR-binding peptide
RIKPHQGQHNSLQEVVNNASDYYVIPLPE

SEQ ID NO: 99339 - protein, 29 aa, Artificial Sequence
  Cyclic GFR-binding peptide
RIKPHQGQHNSLQEVKPTRGVYYLITLPE

SEQ ID NO: 99340 - protein, 29 aa, Artificial Sequence
  Cyclic GFR-binding peptide
RIKPHQGQHEYQKYIKPTKGIIFLISIPS

SEQ ID NO: 99341 - protein, 29 aa, Artificial Sequence
  Cyclic GFR-binding peptide
RIKPHQGQHEYQKYVVNNASDIFLISIPS

SEQ ID NO: 99342 - protein, 29 aa, Artificial Sequence
  Cyclic GFR-binding peptide
RIKPHQGQHNSLQEIVNSSDDYYVVPLPE

SEQ ID NO: 99343 - protein, 29 aa, Artificial Sequence
  Cyclic GFR-binding peptide
RIKPHQGQHNSLQEVVKDYEDYYVMPLPE

SEQ ID NO: 99344 - protein, 29 aa, Artificial Sequence
  Cyclic GFR-binding peptide
RIKPHQGQHEYQKYVVKENEDIFLMSIPS

SEQ ID NO: 99345 - protein, 29 aa, Artificial Sequence
  Cyclic GFR-binding peptide
RIKPHQGQHNSLQEVVKENEDYYVMPLPE

SEQ ID NO: 99346 - protein, 29 aa, Artificial Sequence
  Cyclic GFR-binding peptide
RIKPHQGQHEYQKYVVKDYEDIFLMSIPS

SEQ ID NO: 99347 - protein, 29 aa, Artificial Sequence
  Cyclic GFR-binding peptide
RIKPHQGQHQYNKLVVNNASDLYLISIAS

SEQ ID NO: 99348 - protein, 29 aa, Artificial Sequence
  Cyclic GFR-binding peptide
RIKPHQGQHNSLQEIKPTKGIYYLITLPE

SEQ ID NO: 99349 - protein, 29 aa, Artificial Sequence
  Cyclic GFR-binding peptide
RIKPHQGQHEYQKYVKPKRGVIFLISIPS

SEQ ID NO: 99350 - protein, 29 aa, Artificial Sequence
  Cyclic GFR-binding peptide
RIKPHQGQHRYKKLVVNNASDFYLISIAN

SEQ ID NO: 99351 - protein, 29 aa, Artificial Sequence
  Cyclic GFR-binding peptide
RIKPHQGQHNSLQEIVNSSDDYYLVTLPE

SEQ ID NO: 99352 - protein, 29 aa, Artificial Sequence
  Cyclic GFR-binding peptide
EPLTMLYYDEYDKVVEQLSNRIKPHQGQH

SEQ ID NO: 99353 - protein, 29 aa, Artificial Sequence
  Cyclic GFR-binding peptide
EPLPIVYYIGKTPKIEQLSNRIKPHQGQH

SEQ ID NO: 99354 - protein, 29 aa, Artificial Sequence
  Cyclic GFR-binding peptide
EPLTILYYVGRKPKVEQLSNRIKPHQGQH

SEQ ID NO: 99355 - protein, 29 aa, Artificial Sequence
  Cyclic GFR-binding peptide
EPLPIVYYVGRTPKVEQLSNRIKPHQGQH

SEQ ID NO: 99356 - protein, 29 aa, Artificial Sequence
  Cyclic GFR-binding peptide
SPISVLFIDDSSNVIYKQYERIKPHQGQH

SEQ ID NO: 99357 - protein, 29 aa, Artificial Sequence
  Cyclic GFR-binding peptide
SPISILFIVGRTPKVYKQYERIKPHQGQH

SEQ ID NO: 99358 - protein, 29 aa, Artificial Sequence
  Cyclic GFR-binding peptide
EPLTMLYYDENEKVVEQLSNRIKPHQGQH

SEQ ID NO: 99359 - protein, 29 aa, Artificial Sequence
  Cyclic GFR-binding peptide
EPLTILYYDSANNVVEQLSNRIKPHQGQH

SEQ ID NO: 99360 - protein, 29 aa, Artificial Sequence
  Cyclic GFR-binding peptide
EPLPIVYYVGRKPKVEQLSNRIKPHQGQH

SEQ ID NO: 99361 - protein, 29 aa, Artificial Sequence
  Cyclic GFR-binding peptide
EPLPIVYYDSANNVVEQLSNRIKPHQGQH

SEQ ID NO: 99362 - protein, 29 aa, Artificial Sequence
  Cyclic GFR-binding peptide
EPLTILYYVGRTPKVEQLSNRIKPHQGQH

SEQ ID NO: 99363 - protein, 29 aa, Artificial Sequence
  Cyclic GFR-binding peptide
SPISILFIIGKTPKIYKQYERIKPHQGQH

SEQ ID NO: 99364 - protein, 29 aa, Artificial Sequence
  Cyclic GFR-binding peptide
SPISILFIDSANNVVYKQYERIKPHQGQH

SEQ ID NO: 99365 - protein, 29 aa, Artificial Sequence
  Cyclic GFR-binding peptide
EPLPVVYYDDSSNVIEQLSNRIKPHQGQH

SEQ ID NO: 99366 - protein, 29 aa, Artificial Sequence
  Cyclic GFR-binding peptide
EPLPMVYYDEYDKVVEQLSNRIKPHQGQH

SEQ ID NO: 99367 - protein, 29 aa, Artificial Sequence
  Cyclic GFR-binding peptide
SPISMLFIDENEKVVYKQYERIKPHQGQH

SEQ ID NO: 99368 - protein, 29 aa, Artificial Sequence
  Cyclic GFR-binding peptide
EPLPMVYYDENEKVVEQLSNRIKPHQGQH

SEQ ID NO: 99369 - protein, 29 aa, Artificial Sequence
  Cyclic GFR-binding peptide
SPISMLFIDEYDKVVYKQYERIKPHQGQH

SEQ ID NO: 99370 - protein, 29 aa, Artificial Sequence
  Cyclic GFR-binding peptide
SAISILYLDSANNVVLKNYQRIKPHQGQH

SEQ ID NO: 99371 - protein, 29 aa, Artificial Sequence
  Cyclic GFR-binding peptide
EPLTILYYIGKTPKIEQLSNRIKPHQGQH

SEQ ID NO: 99372 - protein, 29 aa, Artificial Sequence
  Cyclic GFR-binding peptide
SPISILFIVGRKPKVYKQYERIKPHQGQH

SEQ ID NO: 99373 - protein, 29 aa, Artificial Sequence
  Cyclic GFR-binding peptide
NAISILYFDSANNVVLKKYRRIKPHQGQH

SEQ ID NO: 99374 - protein, 29 aa, Artificial Sequence
  Cyclic GFR-binding peptide
EPLTVLYYDDSSNVIEQLSNRIKPHQGQH

SEQ ID NO: 99375 - protein, 31 aa, Artificial Sequence
  Cyclic GFR-binding peptide
RIKPHQGQHVTAKKLKPKKRVYEIKRVQVPR

SEQ ID NO: 99376 - protein, 31 aa, Artificial Sequence
  Cyclic GFR-binding peptide
RIKPHQGQHVQVEKLKPKKRVYEVKAVKVSR

SEQ ID NO: 99377 - protein, 31 aa, Artificial Sequence
  Cyclic GFR-binding peptide
RIKPHQGQHVQVEKFIPKKRVIEVKAVKVSR

SEQ ID NO: 99378 - protein, 31 aa, Artificial Sequence
  Cyclic GFR-binding peptide
RIKPHQGQHVQVEKHQGQHPKIRVKAMKVSR

SEQ ID NO: 99379 - protein, 31 aa, Artificial Sequence
  Cyclic GFR-binding peptide
RIKPHQGQHVTAKKHQGQHPKIRIKRMQVPR

SEQ ID NO: 99380 - protein, 31 aa, Artificial Sequence
  Cyclic GFR-binding peptide
RIKPHQGQHSMEGLLKPKKRVYEMIQVTINS

SEQ ID NO: 99381 - protein, 31 aa, Artificial Sequence
  Cyclic GFR-binding peptide
RIKPHQGQHSMEGIFIPKKRVIEMIQVTINS

SEQ ID NO: 99382 - protein, 31 aa, Artificial Sequence
  Cyclic GFR-binding peptide
RIKPHQGQHSMEGLHQGQHPKIRMIQMTINS

SEQ ID NO: 99383 - protein, 31 aa, Artificial Sequence
  Cyclic GFR-binding peptide
RIKPHQGQHSMEGILKPKKRVYEMIQVTINS

SEQ ID NO: 99384 - protein, 31 aa, Artificial Sequence
  Cyclic GFR-binding peptide
RIKPHQGQHSMEGLFIPKKRVIEMIQVTINS

SEQ ID NO: 99385 - protein, 31 aa, Artificial Sequence
  Cyclic GFR-binding peptide
RIKPHQGQHVTAKKFIPKKRVIEIKRVQVPR

SEQ ID NO: 99386 - protein, 31 aa, Artificial Sequence
  Cyclic GFR-binding peptide
RIKPHQGQHSMEGIHQGQHPKIRMIQMTINS

SEQ ID NO: 99387 - protein, 31 aa, Artificial Sequence
  Cyclic GFR-binding peptide
RPVQVRKIEYVRKKPKLKKATVRIKPHQGQH

SEQ ID NO: 99388 - protein, 31 aa, Artificial Sequence
  Cyclic GFR-binding peptide
RSVKVAKVEYVRKKPKLKEVQVRIKPHQGQH

SEQ ID NO: 99389 - protein, 31 aa, Artificial Sequence
  Cyclic GFR-binding peptide
RSVKVAKVEIVRKKPIFKEVQVRIKPHQGQH

SEQ ID NO: 99390 - protein, 31 aa, Artificial Sequence
  Cyclic GFR-binding peptide
RSVKMAKVRIKPHQGQHKEVQVRIKPHQGQH

SEQ ID NO: 99391 - protein, 31 aa, Artificial Sequence
  Cyclic GFR-binding peptide
RPVQMRKIRIKPHQGQHKKATVRIKPHQGQH

SEQ ID NO: 99392 - protein, 31 aa, Artificial Sequence
  Cyclic GFR-binding peptide
SNITVQIMEYVRKKPKLLGEMSRIKPHQGQH

SEQ ID NO: 99393 - protein, 31 aa, Artificial Sequence
  Cyclic GFR-binding peptide
SNITVQIMEIVRKKPIFIGEMSRIKPHQGQH

SEQ ID NO: 99394 - protein, 31 aa, Artificial Sequence
  Cyclic GFR-binding peptide
SNITMQIMRIKPHQGQHLGEMSRIKPHQGQH

SEQ ID NO: 99395 - protein, 31 aa, Artificial Sequence
  Cyclic GFR-binding peptide
SNITVQIMEYVRKKPKLIGEMSRIKPHQGQH

SEQ ID NO: 99396 - protein, 31 aa, Artificial Sequence
  Cyclic GFR-binding peptide
SNITVQIMEIVRKKPIFLGEMSRIKPHQGQH

SEQ ID NO: 99397 - protein, 31 aa, Artificial Sequence
  Cyclic GFR-binding peptide
RPVQVRKIEIVRKKPIFKKATVRIKPHQGQH

SEQ ID NO: 99398 - protein, 31 aa, Artificial Sequence
  Cyclic GFR-binding peptide
SNITMQIMRIKPHQGQHIGEMSRIKPHQGQH

SEQ ID NO: 99399 - protein, 29 aa, Artificial Sequence
  Cyclic GFR-binding peptide
RIKPHQGQHEYKFKVKPTRGVLYLISIPE

SEQ ID NO: 99400 - protein, 29 aa, Artificial Sequence
  Cyclic GFR-binding peptide
RIKPHQGQHEYKFKTPVGMDDLYLVSIPE

SEQ ID NO: 99401 - protein, 29 aa, Artificial Sequence
  Cyclic GFR-binding peptide
RIKPHQGQHEYQKYVKPKRGVIYLISIPS

SEQ ID NO: 99402 - protein, 29 aa, Artificial Sequence
  Cyclic GFR-binding peptide
RIKPHQGQHEYQKYVVKDYEDIYLMSIPS

SEQ ID NO: 99403 - protein, 29 aa, Artificial Sequence
  Cyclic GFR-binding peptide
RIKPHQGQHEYKFKIKPTKGILYLISIPE

SEQ ID NO: 99404 - protein, 29 aa, Artificial Sequence
  Cyclic GFR-binding peptide
RIKPHQGQHYHYKLYTVVGKDKYLISIPS

SEQ ID NO: 99405 - protein, 29 aa, Artificial Sequence
  Cyclic GFR-binding peptide
RIKPHQGQHRYKKLYTVVGKDFYLISIAN

SEQ ID NO: 99406 - protein, 29 aa, Artificial Sequence
  Cyclic GFR-binding peptide
RIKPHQGQHEYQKYVVNNAADIYLISIPS

SEQ ID NO: 99407 - protein, 29 aa, Artificial Sequence
  Cyclic GFR-binding peptide
RIKPHQGQHEYQKYVKPTRGVIYLISIPS

SEQ ID NO: 99408 - protein, 29 aa, Artificial Sequence
  Cyclic GFR-binding peptide
RIKPHQGQHEYQKYTPVGMDDIYLVSIPS

SEQ ID NO: 99409 - protein, 29 aa, Artificial Sequence
  Cyclic GFR-binding peptide
RIKPHQGQHEYKFKVVKDYEDLYLMSIPE

SEQ ID NO: 99410 - protein, 29 aa, Artificial Sequence
  Cyclic GFR-binding peptide
RIKPHQGQHEYKFKVVNNAADLYLISIPE

SEQ ID NO: 99411 - protein, 29 aa, Artificial Sequence
  Cyclic GFR-binding peptide
RIKPHQGQHEYQKYVVKENEDIYLMSIPS

SEQ ID NO: 99412 - protein, 29 aa, Artificial Sequence
  Cyclic GFR-binding peptide
RIKPHQGQHEYQKYIKPTKGIIYLISIPS

SEQ ID NO: 99413 - protein, 29 aa, Artificial Sequence
  Cyclic GFR-binding peptide
RIKPHQGQHRYKKLVVNNAADFYLISIAN

SEQ ID NO: 99414 - protein, 29 aa, Artificial Sequence
  Cyclic GFR-binding peptide
RIKPHQGQHYHYKLVVNNAADKYLISIPS

SEQ ID NO: 99415 - protein, 29 aa, Artificial Sequence
  Cyclic GFR-binding peptide
RIKPHQGQHEYKFKIVNNSSDLYLVSIPE

SEQ ID NO: 99416 - protein, 29 aa, Artificial Sequence
  Cyclic GFR-binding peptide
RIKPHQGQHEYQKYIVNSSDDIYLVSIPS

SEQ ID NO: 99417 - protein, 29 aa, Artificial Sequence
  Cyclic GFR-binding peptide
RIKPHQGQHEYKFKIVNSSDDLYLVSIPE

SEQ ID NO: 99418 - protein, 29 aa, Artificial Sequence
  Cyclic GFR-binding peptide
RIKPHQGQHEYKFKVKPKRGVLYLISIPE

SEQ ID NO: 99419 - protein, 29 aa, Artificial Sequence
  Cyclic GFR-binding peptide
RIKPHQGQHEYQKYYTVVGKDIYLISIPS

SEQ ID NO: 99420 - protein, 29 aa, Artificial Sequence
  Cyclic GFR-binding peptide
RIKPHQGQHEYKFKVVKENEDLYLMSIPE

SEQ ID NO: 99421 - protein, 29 aa, Artificial Sequence
  Cyclic GFR-binding peptide
RIKPHQGQHEYQKYIVNNSSDIYLVSIPS

SEQ ID NO: 99422 - protein, 29 aa, Artificial Sequence
  Cyclic GFR-binding peptide
RIKPHQGQHEYKFKYTVVGKDLYLISIPE

SEQ ID NO: 99423 - protein, 29 aa, Artificial Sequence
  Cyclic GFR-binding peptide
EPISILYLVGRTPKVKFKYERIKPHQGQH

SEQ ID NO: 99424 - protein, 29 aa, Artificial Sequence
  Cyclic GFR-binding peptide
EPISVLYLDDMGVPTKFKYERIKPHQGQH

SEQ ID NO: 99425 - protein, 29 aa, Artificial Sequence
  Cyclic GFR-binding peptide
SPISILYIVGRKPKVYKQYERIKPHQGQH

SEQ ID NO: 99426 - protein, 29 aa, Artificial Sequence
  Cyclic GFR-binding peptide
SPISMLYIDEYDKVVYKQYERIKPHQGQH

SEQ ID NO: 99427 - protein, 29 aa, Artificial Sequence
  Cyclic GFR-binding peptide
EPISILYLIGKTPKIKFKYERIKPHQGQH

SEQ ID NO: 99428 - protein, 29 aa, Artificial Sequence
  Cyclic GFR-binding peptide
SPISILYKDKGVVTYLKYHYRIKPHQGQH

SEQ ID NO: 99429 - protein, 29 aa, Artificial Sequence
  Cyclic GFR-binding peptide
NAISILYFDKGVVTYLKKYRRIKPHQGQH

SEQ ID NO: 99430 - protein, 29 aa, Artificial Sequence
  Cyclic GFR-binding peptide
SPISILYIDAANNVVYKQYERIKPHQGQH

SEQ ID NO: 99431 - protein, 29 aa, Artificial Sequence
  Cyclic GFR-binding peptide
SPISILYIVGRTPKVYKQYERIKPHQGQH

SEQ ID NO: 99432 - protein, 29 aa, Artificial Sequence
  Cyclic GFR-binding peptide
SPISVLYIDDMGVPTYKQYERIKPHQGQH

SEQ ID NO: 99433 - protein, 29 aa, Artificial Sequence
  Cyclic GFR-binding peptide
EPISMLYLDEYDKVVKFKYERIKPHQGQH

SEQ ID NO: 99434 - protein, 29 aa, Artificial Sequence
  Cyclic GFR-binding peptide
EPISILYLDAANNVVKFKYERIKPHQGQH

SEQ ID NO: 99435 - protein, 29 aa, Artificial Sequence
  Cyclic GFR-binding peptide
SPISMLYIDENEKVVYKQYERIKPHQGQH

SEQ ID NO: 99436 - protein, 29 aa, Artificial Sequence
  Cyclic GFR-binding peptide
SPISILYIIGKTPKIYKQYERIKPHQGQH

SEQ ID NO: 99437 - protein, 29 aa, Artificial Sequence
  Cyclic GFR-binding peptide
NAISILYFDAANNVVLKKYRRIKPHQGQH

SEQ ID NO: 99438 - protein, 29 aa, Artificial Sequence
  Cyclic GFR-binding peptide
SPISILYKDAANNVVLKYHYRIKPHQGQH

SEQ ID NO: 99439 - protein, 29 aa, Artificial Sequence
  Cyclic GFR-binding peptide
EPISVLYLDSSNNVIKFKYERIKPHQGQH

SEQ ID NO: 99440 - protein, 29 aa, Artificial Sequence
  Cyclic GFR-binding peptide
SPISVLYIDDSSNVIYKQYERIKPHQGQH

SEQ ID NO: 99441 - protein, 29 aa, Artificial Sequence
  Cyclic GFR-binding peptide
EPISVLYLDDSSNVIKFKYERIKPHQGQH

SEQ ID NO: 99442 - protein, 29 aa, Artificial Sequence
  Cyclic GFR-binding peptide
EPISILYLVGRKPKVKFKYERIKPHQGQH

SEQ ID NO: 99443 - protein, 29 aa, Artificial Sequence
  Cyclic GFR-binding peptide
SPISILYIDKGVVTYYKQYERIKPHQGQH

SEQ ID NO: 99444 - protein, 29 aa, Artificial Sequence
  Cyclic GFR-binding peptide
EPISMLYLDENEKVVKFKYERIKPHQGQH

SEQ ID NO: 99445 - protein, 29 aa, Artificial Sequence
  Cyclic GFR-binding peptide
SPISVLYIDSSNNVIYKQYERIKPHQGQH

SEQ ID NO: 99446 - protein, 29 aa, Artificial Sequence
  Cyclic GFR-binding peptide
EPISILYLDKGVVTYKFKYERIKPHQGQH

SEQ ID NO: 99447 - protein, 29 aa, Artificial Sequence
  Cyclic GFR-binding peptide
RIKPHQGQHPIKGYIIQQKDNFYLMNIPS

SEQ ID NO: 99448 - protein, 29 aa, Artificial Sequence
  Cyclic GFR-binding peptide
RIKPHQGQHPIKGYVVKDYEDFYLMNIPS

SEQ ID NO: 99449 - protein, 29 aa, Artificial Sequence
  Cyclic GFR-binding peptide
RIKPHQGQHPIKGYIVNSSDDFYLVNIPS

SEQ ID NO: 99450 - protein, 29 aa, Artificial Sequence
  Cyclic GFR-binding peptide
RIKPHQGQHPIKGYVVNNAADFYLINIPS

SEQ ID NO: 99451 - protein, 29 aa, Artificial Sequence
  Cyclic GFR-binding peptide
RIKPHQGQHPIKGYYTVVGKDFYLINIPS

SEQ ID NO: 99452 - protein, 29 aa, Artificial Sequence
  Cyclic GFR-binding peptide
RIKPHQGQHPIKGYLLVRGNDFYLMNIPS

SEQ ID NO: 99453 - protein, 29 aa, Artificial Sequence
  Cyclic GFR-binding peptide
RIKPHQGQHPIKGYVVKENEDFYLMNIPS

SEQ ID NO: 99454 - protein, 29 aa, Artificial Sequence
  Cyclic GFR-binding peptide
RIKPHQGQHPIKGYVVNNASDFYLINIPS

SEQ ID NO: 99455 - protein, 29 aa, Artificial Sequence
  Cyclic GFR-binding peptide
RIKPHQGQHPIKGYTPVGMDDFYLVNIPS

SEQ ID NO: 99456 - protein, 29 aa, Artificial Sequence
  Cyclic GFR-binding peptide
RIKPHQGQHPIKGYIVNNSSDFYLVNIPS

SEQ ID NO: 99457 - protein, 29 aa, Artificial Sequence
  Cyclic GFR-binding peptide
SPINMLYFNDKQQIIYGKIPRIKPHQGQH

SEQ ID NO: 99458 - protein, 29 aa, Artificial Sequence
  Cyclic GFR-binding peptide
SPINMLYFDEYDKVVYGKIPRIKPHQGQH

SEQ ID NO: 99459 - protein, 29 aa, Artificial Sequence
  Cyclic GFR-binding peptide
SPINVLYFDDSSNVIYGKIPRIKPHQGQH

SEQ ID NO: 99460 - protein, 29 aa, Artificial Sequence
  Cyclic GFR-binding peptide
SPINILYFDAANNVVYGKIPRIKPHQGQH

SEQ ID NO: 99461 - protein, 29 aa, Artificial Sequence
  Cyclic GFR-binding peptide
SPINILYFDKGVVTYYGKIPRIKPHQGQH

SEQ ID NO: 99462 - protein, 29 aa, Artificial Sequence
  Cyclic GFR-binding peptide
SPINMLYFDNGRVLLYGKIPRIKPHQGQH

SEQ ID NO: 99463 - protein, 29 aa, Artificial Sequence
  Cyclic GFR-binding peptide
SPINMLYFDENEKVVYGKIPRIKPHQGQH

SEQ ID NO: 99464 - protein, 29 aa, Artificial Sequence
  Cyclic GFR-binding peptide
SPINILYFDSANNVVYGKIPRIKPHQGQH

SEQ ID NO: 99465 - protein, 29 aa, Artificial Sequence
  Cyclic GFR-binding peptide
SPINVLYFDDMGVPTYGKIPRIKPHQGQH

SEQ ID NO: 99466 - protein, 29 aa, Artificial Sequence
  Cyclic GFR-binding peptide
SPINVLYFDSSNNVIYGKIPRIKPHQGQH

SEQ ID NO: 99467 - protein, 29 aa, Artificial Sequence
  Cyclic GFR-binding peptide
RIKPHQGQHEYQKYVVNNASDIYLISIPS

SEQ ID NO: 99468 - protein, 29 aa, Artificial Sequence
  Cyclic GFR-binding peptide
RIKPHQGQHEYQKYIIQQKDNIYLMSIPS

SEQ ID NO: 99469 - protein, 29 aa, Artificial Sequence
  Cyclic GFR-binding peptide
RIKPHQGQHEYQKYLLVRGNDIYLMSIPS

SEQ ID NO: 99470 - protein, 29 aa, Artificial Sequence
  Cyclic GFR-binding peptide
SPISILYIDSANNVVYKQYERIKPHQGQH

SEQ ID NO: 99471 - protein, 29 aa, Artificial Sequence
  Cyclic GFR-binding peptide
SPISMLYINDKQQIIYKQYERIKPHQGQH

SEQ ID NO: 99472 - protein, 29 aa, Artificial Sequence
  Cyclic GFR-binding peptide
SPISMLYIDNGRVLLYKQYERIKPHQGQH

SEQ ID NO: 99473 - protein, 29 aa, Artificial Sequence
  Cyclic GFR-binding peptide
RIKPHQGQHPYVKLYTVVGKDFFLISLSS

SEQ ID NO: 99474 - protein, 29 aa, Artificial Sequence
  Cyclic GFR-binding peptide
RIKPHQGQHPYVKLIKPTKGIFFLISLSS

SEQ ID NO: 99475 - protein, 29 aa, Artificial Sequence
  Cyclic GFR-binding peptide
RIKPHQGQHPYVKLIIQQKDNFFLMSLSS

SEQ ID NO: 99476 - protein, 29 aa, Artificial Sequence
  Cyclic GFR-binding peptide
RIKPHQGQHPYVKLIVNSSDDFFLVSLSS

SEQ ID NO: 99477 - protein, 29 aa, Artificial Sequence
  Cyclic GFR-binding peptide
RIKPHQGQHPYVKLVKPKRGVFFLISLSS

SEQ ID NO: 99478 - protein, 29 aa, Artificial Sequence
  Cyclic GFR-binding peptide
RIKPHQGQHPYVKLVKPTRGVFFLISLSS

SEQ ID NO: 99479 - protein, 29 aa, Artificial Sequence
  Cyclic GFR-binding peptide
RIKPHQGQHPYVKLTPVGMDDFFLVSLSS

SEQ ID NO: 99480 - protein, 31 aa, Artificial Sequence
  Cyclic GFR-binding peptide
RIKPHQGQHPYVKLHQGQHPKIRFFLMSLSS

SEQ ID NO: 99481 - protein, 29 aa, Artificial Sequence
  Cyclic GFR-binding peptide
RIKPHQGQHPYVKLVVNKNEDFFLISLSS

SEQ ID NO: 99482 - protein, 29 aa, Artificial Sequence
  Cyclic GFR-binding peptide
RIKPHQGQHPYVKLVVNNASDFFLISLSS

SEQ ID NO: 99483 - protein, 29 aa, Artificial Sequence
  Cyclic GFR-binding peptide
RIKPHQGQHPYVKLVVKENEDFFLMSLSS

SEQ ID NO: 99484 - protein, 29 aa, Artificial Sequence
  Cyclic GFR-binding peptide
RIKPHQGQHPYVKLIVNNSSDFFLVSLSS

SEQ ID NO: 99485 - protein, 31 aa, Artificial Sequence
  Cyclic GFR-binding peptide
RIKPHQGQHPYVKLLKPKKRVYEFFLVSLSS

SEQ ID NO: 99486 - protein, 29 aa, Artificial Sequence
  Cyclic GFR-binding peptide
RIKPHQGQHPYVKLLLVRGNDFFLMSLSS

SEQ ID NO: 99487 - protein, 29 aa, Artificial Sequence
  Cyclic GFR-binding peptide
RIKPHQGQHPYVKLVVKDYEDFFLMSLSS

SEQ ID NO: 99488 - protein, 29 aa, Artificial Sequence
  Cyclic GFR-binding peptide
RIKPHQGQHPYVKLVVNNAADFFLISLSS

SEQ ID NO: 99489 - protein, 29 aa, Artificial Sequence
  Cyclic GFR-binding peptide
SSLSILFFDKGVVTYLKVYPRIKPHQGQH

SEQ ID NO: 99490 - protein, 29 aa, Artificial Sequence
  Cyclic GFR-binding peptide
SSLSILFFIGKTPKILKVYPRIKPHQGQH

SEQ ID NO: 99491 - protein, 29 aa, Artificial Sequence
  Cyclic GFR-binding peptide
SSLSMLFFNDKQQIILKVYPRIKPHQGQH

SEQ ID NO: 99492 - protein, 29 aa, Artificial Sequence
  Cyclic GFR-binding peptide
SSLSVLFFDDSSNVILKVYPRIKPHQGQH

SEQ ID NO: 99493 - protein, 29 aa, Artificial Sequence
  Cyclic GFR-binding peptide
SSLSILFFVGRKPKVLKVYPRIKPHQGQH

SEQ ID NO: 99494 - protein, 29 aa, Artificial Sequence
  Cyclic GFR-binding peptide
SSLSILFFVGRTPKVLKVYPRIKPHQGQH

SEQ ID NO: 99495 - protein, 29 aa, Artificial Sequence
  Cyclic GFR-binding peptide
SSLSVLFFDDMGVPTLKVYPRIKPHQGQH

SEQ ID NO: 99496 - protein, 31 aa, Artificial Sequence
  Cyclic GFR-binding peptide
SSLSMLFFRIKPHQGQHLKVYPRIKPHQGQH

SEQ ID NO: 99497 - protein, 29 aa, Artificial Sequence
  Cyclic GFR-binding peptide
SSLSILFFDENKNVVLKVYPRIKPHQGQH

SEQ ID NO: 99498 - protein, 29 aa, Artificial Sequence
  Cyclic GFR-binding peptide
SSLSILFFDSANNVVLKVYPRIKPHQGQH

SEQ ID NO: 99499 - protein, 29 aa, Artificial Sequence
  Cyclic GFR-binding peptide
SSLSMLFFDENEKVVLKVYPRIKPHQGQH

SEQ ID NO: 99500 - protein, 29 aa, Artificial Sequence
  Cyclic GFR-binding peptide
SSLSVLFFDSSNNVILKVYPRIKPHQGQH

SEQ ID NO: 99501 - protein, 31 aa, Artificial Sequence
  Cyclic GFR-binding peptide
SSLSVLFFEYVRKKPKLLKVYPRIKPHQGQH

SEQ ID NO: 99502 - protein, 29 aa, Artificial Sequence
  Cyclic GFR-binding peptide
SSLSMLFFDNGRVLLLKVYPRIKPHQGQH

SEQ ID NO: 99503 - protein, 29 aa, Artificial Sequence
  Cyclic GFR-binding peptide
SSLSMLFFDEYDKVVLKVYPRIKPHQGQH

SEQ ID NO: 99504 - protein, 29 aa, Artificial Sequence
  Cyclic GFR-binding peptide
SSLSILFFDAANNVVLKVYPRIKPHQGQH

SEQ ID NO: 99505 - protein, 29 aa, Artificial Sequence
  Cyclic GFR-binding peptide
RIKPHQGQHSMEGIIVNSSDDMIQVTINS

SEQ ID NO: 99506 - protein, 29 aa, Artificial Sequence
  Cyclic GFR-binding peptide
RIKPHQGQHVTAKKVVKENEDIKRMQVPR

SEQ ID NO: 99507 - protein, 29 aa, Artificial Sequence
  Cyclic GFR-binding peptide
RIKPHQGQHSMEGIVVKDYEDMIQMTINS

SEQ ID NO: 99508 - protein, 29 aa, Artificial Sequence
  Cyclic GFR-binding peptide
RIKPHQGQHVTAKKIKPTKGIIKRIQVPR

SEQ ID NO: 99509 - protein, 29 aa, Artificial Sequence
  Cyclic GFR-binding peptide
RIKPHQGQHSMEGIVKPTRGVMIQITINS

SEQ ID NO: 99510 - protein, 31 aa, Artificial Sequence
  Cyclic GFR-binding peptide
RIKPHQGQHNSLQEFIPKKRVIEYYVVPLPE

SEQ ID NO: 99511 - protein, 29 aa, Artificial Sequence
  Cyclic GFR-binding peptide
RIKPHQGQHVQVEKVKPKRGVVKAIKVSR

SEQ ID NO: 99512 - protein, 29 aa, Artificial Sequence
  Cyclic GFR-binding peptide
RIKPHQGQHVQVEKVVKENEDVKAMKVSR

SEQ ID NO: 99513 - protein, 29 aa, Artificial Sequence
  Cyclic GFR-binding peptide
RIKPHQGQHVTAKKIVNSSDDIKRVQVPR

SEQ ID NO: 99514 - protein, 29 aa, Artificial Sequence
  Cyclic GFR-binding peptide
RIKPHQGQHVQVEKIKPTKGIVKAIKVSR

SEQ ID NO: 99515 - protein, 31 aa, Artificial Sequence
  Cyclic GFR-binding peptide
RIKPHQGQHNSLQEFIPKKRVIEYYLVTLPE

SEQ ID NO: 99516 - protein, 29 aa, Artificial Sequence
  Cyclic GFR-binding peptide
RIKPHQGQHVQVEKIVNSSDDVKAVKVSR

SEQ ID NO: 99517 - protein, 29 aa, Artificial Sequence
  Cyclic GFR-binding peptide
RIKPHQGQHVTAKKVKPKRGVIKRIQVPR

SEQ ID NO: 99518 - protein, 29 aa, Artificial Sequence
  Cyclic GFR-binding peptide
RIKPHQGQHVQVEKVKPTRGVVKAIKVSR

SEQ ID NO: 99519 - protein, 29 aa, Artificial Sequence
  Cyclic GFR-binding peptide
RIKPHQGQHVTAKKVKPTRGVIKRIQVPR

SEQ ID NO: 99520 - protein, 31 aa, Artificial Sequence
  Cyclic GFR-binding peptide
RIKPHQGQHNSLQELKPKKRVYEYYLVTLPE

SEQ ID NO: 99521 - protein, 29 aa, Artificial Sequence
  Cyclic GFR-binding peptide
RIKPHQGQHSMEGIVKPKRGVMIQITINS

SEQ ID NO: 99522 - protein, 29 aa, Artificial Sequence
  Cyclic GFR-binding peptide
RIKPHQGQHSMEGIVVKENEDMIQMTINS

SEQ ID NO: 99523 - protein, 29 aa, Artificial Sequence
  Cyclic GFR-binding peptide
RIKPHQGQHSMEGIIKPTKGIMIQITINS

SEQ ID NO: 99524 - protein, 31 aa, Artificial Sequence
  Cyclic GFR-binding peptide
RIKPHQGQHNSLQEHQGQHPKIRYYLMTLPE

SEQ ID NO: 99525 - protein, 29 aa, Artificial Sequence
  Cyclic GFR-binding peptide
RIKPHQGQHVTAKKVVKDYEDIKRMQVPR

SEQ ID NO: 99526 - protein, 31 aa, Artificial Sequence
  Cyclic GFR-binding peptide
RIKPHQGQHNSLQEHQGQHPKIRYYVMPLPE

SEQ ID NO: 99527 - protein, 31 aa, Artificial Sequence
  Cyclic GFR-binding peptide
RIKPHQGQHNSLQELKPKKRVYEYYVVPLPE

SEQ ID NO: 99528 - protein, 29 aa, Artificial Sequence
  Cyclic GFR-binding peptide
RIKPHQGQHVQVEKVVKDYEDVKAMKVSR

SEQ ID NO: 99529 - protein, 29 aa, Artificial Sequence
  Cyclic GFR-binding peptide
SNITVQIMDDSSNVIIGEMSRIKPHQGQH

SEQ ID NO: 99530 - protein, 29 aa, Artificial Sequence
  Cyclic GFR-binding peptide
RPVQMRKIDENEKVVKKATVRIKPHQGQH

SEQ ID NO: 99531 - protein, 29 aa, Artificial Sequence
  Cyclic GFR-binding peptide
SNITMQIMDEYDKVVIGEMSRIKPHQGQH

SEQ ID NO: 99532 - protein, 29 aa, Artificial Sequence
  Cyclic GFR-binding peptide
RPVQIRKIIGKTPKIKKATVRIKPHQGQH

SEQ ID NO: 99533 - protein, 29 aa, Artificial Sequence
  Cyclic GFR-binding peptide
SNITIQIMVGRTPKVIGEMSRIKPHQGQH

SEQ ID NO: 99534 - protein, 31 aa, Artificial Sequence
  Cyclic GFR-binding peptide
EPLPVVYYEIVRKKPIFEQLSNRIKPHQGQH

SEQ ID NO: 99535 - protein, 29 aa, Artificial Sequence
  Cyclic GFR-binding peptide
RSVKIAKVVGRKPKVKEVQVRIKPHQGQH

SEQ ID NO: 99536 - protein, 29 aa, Artificial Sequence
  Cyclic GFR-binding peptide
RSVKMAKVDENEKVVKEVQVRIKPHQGQH

SEQ ID NO: 99537 - protein, 29 aa, Artificial Sequence
  Cyclic GFR-binding peptide
RPVQVRKIDDSSNVIKKATVRIKPHQGQH

SEQ ID NO: 99538 - protein, 29 aa, Artificial Sequence
  Cyclic GFR-binding peptide
RSVKIAKVIGKTPKIKEVQVRIKPHQGQH

SEQ ID NO: 99539 - protein, 31 aa, Artificial Sequence
  Cyclic GFR-binding peptide
EPLTVLYYEIVRKKPIFEQLSNRIKPHQGQH

SEQ ID NO: 99540 - protein, 29 aa, Artificial Sequence
  Cyclic GFR-binding peptide
RSVKVAKVDDSSNVIKEVQVRIKPHQGQH

SEQ ID NO: 99541 - protein, 29 aa, Artificial Sequence
  Cyclic GFR-binding peptide
RPVQIRKIVGRKPKVKKATVRIKPHQGQH

SEQ ID NO: 99542 - protein, 29 aa, Artificial Sequence
  Cyclic GFR-binding peptide
RSVKIAKVVGRTPKVKEVQVRIKPHQGQH

SEQ ID NO: 99543 - protein, 29 aa, Artificial Sequence
  Cyclic GFR-binding peptide
RPVQIRKIVGRTPKVKKATVRIKPHQGQH

SEQ ID NO: 99544 - protein, 31 aa, Artificial Sequence
  Cyclic GFR-binding peptide
EPLTVLYYEYVRKKPKLEQLSNRIKPHQGQH

SEQ ID NO: 99545 - protein, 29 aa, Artificial Sequence
  Cyclic GFR-binding peptide
SNITIQIMVGRKPKVIGEMSRIKPHQGQH

SEQ ID NO: 99546 - protein, 29 aa, Artificial Sequence
  Cyclic GFR-binding peptide
SNITMQIMDENEKVVIGEMSRIKPHQGQH

SEQ ID NO: 99547 - protein, 29 aa, Artificial Sequence
  Cyclic GFR-binding peptide
SNITIQIMIGKTPKIIGEMSRIKPHQGQH

SEQ ID NO: 99548 - protein, 31 aa, Artificial Sequence
  Cyclic GFR-binding peptide
EPLTMLYYRIKPHQGQHEQLSNRIKPHQGQH

SEQ ID NO: 99549 - protein, 29 aa, Artificial Sequence
  Cyclic GFR-binding peptide
RPVQMRKIDEYDKVVKKATVRIKPHQGQH

SEQ ID NO: 99550 - protein, 31 aa, Artificial Sequence
  Cyclic GFR-binding peptide
EPLPMVYYRIKPHQGQHEQLSNRIKPHQGQH

SEQ ID NO: 99551 - protein, 31 aa, Artificial Sequence
  Cyclic GFR-binding peptide
EPLPVVYYEYVRKKPKLEQLSNRIKPHQGQH

SEQ ID NO: 99552 - protein, 29 aa, Artificial Sequence
  Cyclic GFR-binding peptide
RSVKMAKVDEYDKVVKEVQVRIKPHQGQH

SEQ ID NO: 99553 - protein, 29 aa, Artificial Sequence
  Cyclic GFR-binding peptide
RIKPHQGQHRYKKLIIQQKDNFYLMSIAN

SEQ ID NO: 99554 - protein, 29 aa, Artificial Sequence
  Cyclic GFR-binding peptide
RIKPHQGQHRYKKLLLVRGNDFYLMSIAN

SEQ ID NO: 99555 - protein, 29 aa, Artificial Sequence
  Cyclic GFR-binding peptide
NAISMLYFNDKQQIILKKYRRIKPHQGQH

SEQ ID NO: 99556 - protein, 29 aa, Artificial Sequence
  Cyclic GFR-binding peptide
NAISMLYFDNGRVLLLKKYRRIKPHQGQH

SEQ ID NO: 99557 - protein, 29 aa, Artificial Sequence
  Cyclic GFR-binding peptide
RIKPHQGQHEYKFKVVNKNEDLYLISIPE

SEQ ID NO: 99558 - protein, 29 aa, Artificial Sequence
  Cyclic GFR-binding peptide
RIKPHQGQHPIKGYVKPTRGVFYLINIPS

SEQ ID NO: 99559 - protein, 29 aa, Artificial Sequence
  Cyclic GFR-binding peptide
RIKPHQGQHEYKFKLLVRGNDLYLMSIPE

SEQ ID NO: 99560 - protein, 29 aa, Artificial Sequence
  Cyclic GFR-binding peptide
RIKPHQGQHYHYKLVVNKNEDKYLISIPS

SEQ ID NO: 99561 - protein, 29 aa, Artificial Sequence
  Cyclic GFR-binding peptide
RIKPHQGQHRHKRLLLVRGNDYYLMSTAS

SEQ ID NO: 99562 - protein, 29 aa, Artificial Sequence
  Cyclic GFR-binding peptide
RIKPHQGQHYHYKLLLVRGNDKYLMSIPS

SEQ ID NO: 99563 - protein, 29 aa, Artificial Sequence
  Cyclic GFR-binding peptide
RIKPHQGQHRHKRLVVNKNEDYYLISTAS

SEQ ID NO: 99564 - protein, 29 aa, Artificial Sequence
  Cyclic GFR-binding peptide
RIKPHQGQHRYKKLVVNKNEDFYLISIAN

SEQ ID NO: 99565 - protein, 29 aa, Artificial Sequence
  Cyclic GFR-binding peptide
RIKPHQGQHPIKGYVVNKNEDFYLINIPS

SEQ ID NO: 99566 - protein, 29 aa, Artificial Sequence
  Cyclic GFR-binding peptide
RIKPHQGQHPIKGYIKPTKGIFYLINIPS

SEQ ID NO: 99567 - protein, 29 aa, Artificial Sequence
  Cyclic GFR-binding peptide
RIKPHQGQHRHKRLYTVVGKDYYLISTAS

SEQ ID NO: 99568 - protein, 29 aa, Artificial Sequence
  Cyclic GFR-binding peptide
RIKPHQGQHEYKFKVVNNASDLYLISIPE

SEQ ID NO: 99569 - protein, 29 aa, Artificial Sequence
  Cyclic GFR-binding peptide
RIKPHQGQHRHKRLIIQQKDNYYLMSTAS

SEQ ID NO: 99570 - protein, 29 aa, Artificial Sequence
  Cyclic GFR-binding peptide
RIKPHQGQHEYKFKIIQQKDNLYLMSIPE

SEQ ID NO: 99571 - protein, 29 aa, Artificial Sequence
  Cyclic GFR-binding peptide
RIKPHQGQHPIKGYVKPKRGVFYLINIPS

SEQ ID NO: 99572 - protein, 29 aa, Artificial Sequence
  Cyclic GFR-binding peptide
RIKPHQGQHRHKRLVVNNASDYYLISTAS

SEQ ID NO: 99573 - protein, 29 aa, Artificial Sequence
  Cyclic GFR-binding peptide
RIKPHQGQHYHYKLVVNNASDKYLISIPS

SEQ ID NO: 99574 - protein, 29 aa, Artificial Sequence
  Cyclic GFR-binding peptide
RIKPHQGQHYHYKLIIQQKDNKYLMSIPS

SEQ ID NO: 99575 - protein, 29 aa, Artificial Sequence
  Cyclic GFR-binding peptide
RIKPHQGQHRHKRLVVNNAADYYLISTAS

SEQ ID NO: 99576 - protein, 29 aa, Artificial Sequence
  Cyclic GFR-binding peptide
EPISILYLDENKNVVKFKYERIKPHQGQH

SEQ ID NO: 99577 - protein, 29 aa, Artificial Sequence
  Cyclic GFR-binding peptide
SPINILYFVGRTPKVYGKIPRIKPHQGQH

SEQ ID NO: 99578 - protein, 29 aa, Artificial Sequence
  Cyclic GFR-binding peptide
EPISMLYLDNGRVLLKFKYERIKPHQGQH

SEQ ID NO: 99579 - protein, 29 aa, Artificial Sequence
  Cyclic GFR-binding peptide
SPISILYKDENKNVVLKYHYRIKPHQGQH

SEQ ID NO: 99580 - protein, 29 aa, Artificial Sequence
  Cyclic GFR-binding peptide
SATSMLYYDNGRVLLLRKHRRIKPHQGQH

SEQ ID NO: 99581 - protein, 29 aa, Artificial Sequence
  Cyclic GFR-binding peptide
SPISMLYKDNGRVLLLKYHYRIKPHQGQH

SEQ ID NO: 99582 - protein, 29 aa, Artificial Sequence
  Cyclic GFR-binding peptide
SATSILYYDENKNVVLRKHRRIKPHQGQH

SEQ ID NO: 99583 - protein, 29 aa, Artificial Sequence
  Cyclic GFR-binding peptide
NAISILYFDENKNVVLKKYRRIKPHQGQH

SEQ ID NO: 99584 - protein, 29 aa, Artificial Sequence
  Cyclic GFR-binding peptide
SPINILYFDENKNVVYGKIPRIKPHQGQH

SEQ ID NO: 99585 - protein, 29 aa, Artificial Sequence
  Cyclic GFR-binding peptide
SPINILYFIGKTPKIYGKIPRIKPHQGQH

SEQ ID NO: 99586 - protein, 29 aa, Artificial Sequence
  Cyclic GFR-binding peptide
SATSILYYDKGVVTYLRKHRRIKPHQGQH

SEQ ID NO: 99587 - protein, 29 aa, Artificial Sequence
  Cyclic GFR-binding peptide
EPISILYLDSANNVVKFKYERIKPHQGQH

SEQ ID NO: 99588 - protein, 29 aa, Artificial Sequence
  Cyclic GFR-binding peptide
SATSMLYYNDKQQIILRKHRRIKPHQGQH

SEQ ID NO: 99589 - protein, 29 aa, Artificial Sequence
  Cyclic GFR-binding peptide
EPISMLYLNDKQQIIKFKYERIKPHQGQH

SEQ ID NO: 99590 - protein, 29 aa, Artificial Sequence
  Cyclic GFR-binding peptide
SPINILYFVGRKPKVYGKIPRIKPHQGQH

SEQ ID NO: 99591 - protein, 29 aa, Artificial Sequence
  Cyclic GFR-binding peptide
SATSILYYDSANNVVLRKHRRIKPHQGQH

SEQ ID NO: 99592 - protein, 29 aa, Artificial Sequence
  Cyclic GFR-binding peptide
SPISILYKDSANNVVLKYHYRIKPHQGQH

SEQ ID NO: 99593 - protein, 29 aa, Artificial Sequence
  Cyclic GFR-binding peptide
SPISMLYKNDKQQIILKYHYRIKPHQGQH

SEQ ID NO: 99594 - protein, 29 aa, Artificial Sequence
  Cyclic GFR-binding peptide
SATSILYYDAANNVVLRKHRRIKPHQGQH

SEQ ID NO: 99595 - protein, 29 aa, Artificial Sequence
  Cyclic GFR-binding peptide
RIKPHQGQHSMEGIIIQQKDNMIQMTINS

SEQ ID NO: 99596 - protein, 29 aa, Artificial Sequence
  Cyclic GFR-binding peptide
RIKPHQGQHSMEGLVKPKRGVMIQITINS

SEQ ID NO: 99597 - protein, 29 aa, Artificial Sequence
  Cyclic GFR-binding peptide
RIKPHQGQHSMEGLVVNNASDMIQITINS

SEQ ID NO: 99598 - protein, 29 aa, Artificial Sequence
  Cyclic GFR-binding peptide
RIKPHQGQHSMEGILLVRGNDMIQMTINS

SEQ ID NO: 99599 - protein, 29 aa, Artificial Sequence
  Cyclic GFR-binding peptide
RIKPHQGQHSMEGLIKPTKGIMIQITINS

SEQ ID NO: 99600 - protein, 29 aa, Artificial Sequence
  Cyclic GFR-binding peptide
RIKPHQGQHSMEGLIVNSSDDMIQVTINS

SEQ ID NO: 99601 - protein, 29 aa, Artificial Sequence
  Cyclic GFR-binding peptide
RIKPHQGQHSMEGIVVNNASDMIQITINS

SEQ ID NO: 99602 - protein, 29 aa, Artificial Sequence
  Cyclic GFR-binding peptide
RIKPHQGQHSMEGLVVNNAADMIQITINS

SEQ ID NO: 99603 - protein, 29 aa, Artificial Sequence
  Cyclic GFR-binding peptide
RIKPHQGQHSMEGLLLVRGNDMIQMTINS

SEQ ID NO: 99604 - protein, 29 aa, Artificial Sequence
  Cyclic GFR-binding peptide
RIKPHQGQHSMEGLIIQQKDNMIQMTINS

SEQ ID NO: 99605 - protein, 29 aa, Artificial Sequence
  Cyclic GFR-binding peptide
RIKPHQGQHSMEGIVVNNAADMIQITINS

SEQ ID NO: 99606 - protein, 29 aa, Artificial Sequence
  Cyclic GFR-binding peptide
RIKPHQGQHSMEGLVKPTRGVMIQITINS

SEQ ID NO: 99607 - protein, 29 aa, Artificial Sequence
  Cyclic GFR-binding peptide
SNITMQIMNDKQQIIIGEMSRIKPHQGQH

SEQ ID NO: 99608 - protein, 29 aa, Artificial Sequence
  Cyclic GFR-binding peptide
SNITIQIMVGRKPKVLGEMSRIKPHQGQH

SEQ ID NO: 99609 - protein, 29 aa, Artificial Sequence
  Cyclic GFR-binding peptide
SNITIQIMDSANNVVLGEMSRIKPHQGQH

SEQ ID NO: 99610 - protein, 29 aa, Artificial Sequence
  Cyclic GFR-binding peptide
SNITMQIMDNGRVLLIGEMSRIKPHQGQH

SEQ ID NO: 99611 - protein, 29 aa, Artificial Sequence
  Cyclic GFR-binding peptide
SNITIQIMIGKTPKILGEMSRIKPHQGQH

SEQ ID NO: 99612 - protein, 29 aa, Artificial Sequence
  Cyclic GFR-binding peptide
SNITVQIMDDSSNVILGEMSRIKPHQGQH

SEQ ID NO: 99613 - protein, 29 aa, Artificial Sequence
  Cyclic GFR-binding peptide
SNITIQIMDSANNVVIGEMSRIKPHQGQH

SEQ ID NO: 99614 - protein, 29 aa, Artificial Sequence
  Cyclic GFR-binding peptide
SNITIQIMDAANNVVLGEMSRIKPHQGQH

SEQ ID NO: 99615 - protein, 29 aa, Artificial Sequence
  Cyclic GFR-binding peptide
SNITMQIMDNGRVLLLGEMSRIKPHQGQH

SEQ ID NO: 99616 - protein, 29 aa, Artificial Sequence
  Cyclic GFR-binding peptide
SNITMQIMNDKQQIILGEMSRIKPHQGQH

SEQ ID NO: 99617 - protein, 29 aa, Artificial Sequence
  Cyclic GFR-binding peptide
SNITIQIMDAANNVVIGEMSRIKPHQGQH

SEQ ID NO: 99618 - protein, 29 aa, Artificial Sequence
  Cyclic GFR-binding peptide
SNITIQIMVGRTPKVLGEMSRIKPHQGQH

SEQ ID NO: 99619 - protein, 29 aa, Artificial Sequence
  Cyclic GFR-binding peptide
RIKPHQGQHQYNKLVVNKNEDLYLISIAS

SEQ ID NO: 99620 - protein, 29 aa, Artificial Sequence
  Cyclic GFR-binding peptide
RIKPHQGQHQYNKLVVNNAADLYLISIAS

SEQ ID NO: 99621 - protein, 29 aa, Artificial Sequence
  Cyclic GFR-binding peptide
RIKPHQGQHQYNKLIIQQKDNLYLMSIAS

SEQ ID NO: 99622 - protein, 29 aa, Artificial Sequence
  Cyclic GFR-binding peptide
RIKPHQGQHQYNKLLLVRGNDLYLMSIAS

SEQ ID NO: 99623 - protein, 29 aa, Artificial Sequence
  Cyclic GFR-binding peptide
RIKPHQGQHQYNKLYTVVGKDLYLISIAS

SEQ ID NO: 99624 - protein, 29 aa, Artificial Sequence
  Cyclic GFR-binding peptide
SAISILYLDENKNVVLKNYQRIKPHQGQH

SEQ ID NO: 99625 - protein, 29 aa, Artificial Sequence
  Cyclic GFR-binding peptide
SAISILYLDAANNVVLKNYQRIKPHQGQH

SEQ ID NO: 99626 - protein, 29 aa, Artificial Sequence
  Cyclic GFR-binding peptide
SAISMLYLNDKQQIILKNYQRIKPHQGQH

SEQ ID NO: 99627 - protein, 29 aa, Artificial Sequence
  Cyclic GFR-binding peptide
SAISMLYLDNGRVLLLKNYQRIKPHQGQH

SEQ ID NO: 99628 - protein, 29 aa, Artificial Sequence
  Cyclic GFR-binding peptide
SAISILYLDKGVVTYLKNYQRIKPHQGQH

SEQ ID NO: 99629 - protein, 29 aa, Artificial Sequence
  Cyclic GFR-binding peptide
EYVRKKPKLRYKKLIKPTKGIFYLISIAN

SEQ ID NO: 99630 - protein, 31 aa, Artificial Sequence
  Cyclic GFR-binding peptide
EYVRKKPKLRHKRLFIPKKRVIEYYLVSTAS

SEQ ID NO: 99631 - protein, 29 aa, Artificial Sequence
  Cyclic GFR-binding peptide
EYVRKKPKLYHYKLVVKDYEDKYLMSIPS

SEQ ID NO: 99632 - protein, 29 aa, Artificial Sequence
  Cyclic GFR-binding peptide
EYVRKKPKLQYNKLIVNNSSDLYLVSIAS

SEQ ID NO: 99633 - protein, 29 aa, Artificial Sequence
  Cyclic GFR-binding peptide
EYVRKKPKLRYKKLVVKDYEDFYLMSIAN

SEQ ID NO: 99634 - protein, 29 aa, Artificial Sequence
  Cyclic GFR-binding peptide
EYVRKKPKLRYKKLVKPTRGVFYLISIAN

SEQ ID NO: 99635 - protein, 29 aa, Artificial Sequence
  Cyclic GFR-binding peptide
EYVRKKPKLRHKRLVVKENEDYYLMSTAS

SEQ ID NO: 99636 - protein, 29 aa, Artificial Sequence
  Cyclic GFR-binding peptide
EYVRKKPKLYHYKLIKPTKGIKYLISIPS

SEQ ID NO: 99637 - protein, 31 aa, Artificial Sequence
  Cyclic GFR-binding peptide
EYVRKKPKLRYKKLFIPKKRVIEFYLVSIAN

SEQ ID NO: 99638 - protein, 29 aa, Artificial Sequence
  Cyclic GFR-binding peptide
EYVRKKPKLYHYKLVVKENEDKYLMSIPS

SEQ ID NO: 99639 - protein, 29 aa, Artificial Sequence
  Cyclic GFR-binding peptide
EYVRKKPKLRHKRLVKPKRGVYYLISTAS

SEQ ID NO: 99640 - protein, 29 aa, Artificial Sequence
  Cyclic GFR-binding peptide
EYVRKKPKLYHYKLVKPKRGVKYLISIPS

SEQ ID NO: 99641 - protein, 31 aa, Artificial Sequence
  Cyclic GFR-binding peptide
EYVRKKPKLQYNKLFIPKKRVIELYLVSIAS

SEQ ID NO: 99642 - protein, 29 aa, Artificial Sequence
  Cyclic GFR-binding peptide
EYVRKKPKLQYNKLVKPTRGVLYLISIAS

SEQ ID NO: 99643 - protein, 29 aa, Artificial Sequence
  Cyclic GFR-binding peptide
EYVRKKPKLRYKKLVVKENEDFYLMSIAN

SEQ ID NO: 99644 - protein, 29 aa, Artificial Sequence
  Cyclic GFR-binding peptide
EYVRKKPKLQYNKLTPVGMDDLYLVSIAS

SEQ ID NO: 99645 - protein, 29 aa, Artificial Sequence
  Cyclic GFR-binding peptide
EYVRKKPKLRYKKLTPVGMDDFYLVSIAN

SEQ ID NO: 99646 - protein, 29 aa, Artificial Sequence
  Cyclic GFR-binding peptide
EYVRKKPKLRYKKLVKPKRGVFYLISIAN

SEQ ID NO: 99647 - protein, 29 aa, Artificial Sequence
  Cyclic GFR-binding peptide
EYVRKKPKLQYNKLVVKENEDLYLMSIAS

SEQ ID NO: 99648 - protein, 29 aa, Artificial Sequence
  Cyclic GFR-binding peptide
EYVRKKPKLYHYKLIVNSSDDKYLVSIPS

SEQ ID NO: 99649 - protein, 29 aa, Artificial Sequence
  Cyclic GFR-binding peptide
EYVRKKPKLQYNKLVKPKRGVLYLISIAS

SEQ ID NO: 99650 - protein, 29 aa, Artificial Sequence
  Cyclic GFR-binding peptide
EYVRKKPKLRYKKLIVNNSSDFYLVSIAN

SEQ ID NO: 99651 - protein, 29 aa, Artificial Sequence
  Cyclic GFR-binding peptide
EYVRKKPKLRYKKLIVNSSDDFYLVSIAN

SEQ ID NO: 99652 - protein, 29 aa, Artificial Sequence
  Cyclic GFR-binding peptide
EYVRKKPKLRHKRLVKPTRGVYYLISTAS

SEQ ID NO: 99653 - protein, 31 aa, Artificial Sequence
  Cyclic GFR-binding peptide
EYVRKKPKLYHYKLFIPKKRVIEKYLVSIPS

SEQ ID NO: 99654 - protein, 29 aa, Artificial Sequence
  Cyclic GFR-binding peptide
EYVRKKPKLRHKRLIKPTKGIYYLISTAS

SEQ ID NO: 99655 - protein, 29 aa, Artificial Sequence
  Cyclic GFR-binding peptide
EYVRKKPKLRHKRLTPVGMDDYYLVSTAS

SEQ ID NO: 99656 - protein, 29 aa, Artificial Sequence
  Cyclic GFR-binding peptide
EYVRKKPKLYHYKLTPVGMDDKYLVSIPS

SEQ ID NO: 99657 - protein, 29 aa, Artificial Sequence
  Cyclic GFR-binding peptide
EYVRKKPKLYHYKLIVNNSSDKYLVSIPS

SEQ ID NO: 99658 - protein, 29 aa, Artificial Sequence
  Cyclic GFR-binding peptide
EYVRKKPKLRHKRLIVNNSSDYYLVSTAS

SEQ ID NO: 99659 - protein, 29 aa, Artificial Sequence
  Cyclic GFR-binding peptide
EYVRKKPKLYHYKLVKPTRGVKYLISIPS

SEQ ID NO: 99660 - protein, 29 aa, Artificial Sequence
  Cyclic GFR-binding peptide
EYVRKKPKLRHKRLIVNSSDDYYLVSTAS

SEQ ID NO: 99661 - protein, 29 aa, Artificial Sequence
  Cyclic GFR-binding peptide
EYVRKKPKLRHKRLVVKDYEDYYLMSTAS

SEQ ID NO: 99662 - protein, 29 aa, Artificial Sequence
  Cyclic GFR-binding peptide
EYVRKKPKLQYNKLIKPTKGILYLISIAS

SEQ ID NO: 99663 - protein, 29 aa, Artificial Sequence
  Cyclic GFR-binding peptide
EYVRKKPKLQYNKLVVKDYEDLYLMSIAS

SEQ ID NO: 99664 - protein, 29 aa, Artificial Sequence
  Cyclic GFR-binding peptide
EYVRKKPKLQYNKLIVNSSDDLYLVSIAS

SEQ ID NO: 99665 - protein, 29 aa, Artificial Sequence
  Cyclic GFR-binding peptide
NAISILYFIGKTPKILKKYREYVRKKPKL

SEQ ID NO: 99666 - protein, 31 aa, Artificial Sequence
  Cyclic GFR-binding peptide
SATSVLYYEIVRKKPIFLRKHREYVRKKPKL

SEQ ID NO: 99667 - protein, 29 aa, Artificial Sequence
  Cyclic GFR-binding peptide
SPISMLYKDEYDKVVLKYHYEYVRKKPKL

SEQ ID NO: 99668 - protein, 29 aa, Artificial Sequence
  Cyclic GFR-binding peptide
SAISVLYLDSSNNVILKNYQEYVRKKPKL

SEQ ID NO: 99669 - protein, 29 aa, Artificial Sequence
  Cyclic GFR-binding peptide
NAISMLYFDEYDKVVLKKYREYVRKKPKL

SEQ ID NO: 99670 - protein, 29 aa, Artificial Sequence
  Cyclic GFR-binding peptide
NAISILYFVGRTPKVLKKYREYVRKKPKL

SEQ ID NO: 99671 - protein, 29 aa, Artificial Sequence
  Cyclic GFR-binding peptide
SATSMLYYDENEKVVLRKHREYVRKKPKL

SEQ ID NO: 99672 - protein, 29 aa, Artificial Sequence
  Cyclic GFR-binding peptide
SPISILYKIGKTPKILKYHYEYVRKKPKL

SEQ ID NO: 99673 - protein, 31 aa, Artificial Sequence
  Cyclic GFR-binding peptide
NAISVLYFEIVRKKPIFLKKYREYVRKKPKL

SEQ ID NO: 99674 - protein, 29 aa, Artificial Sequence
  Cyclic GFR-binding peptide
SPISMLYKDENEKVVLKYHYEYVRKKPKL

SEQ ID NO: 99675 - protein, 29 aa, Artificial Sequence
  Cyclic GFR-binding peptide
SATSILYYVGRKPKVLRKHREYVRKKPKL

SEQ ID NO: 99676 - protein, 29 aa, Artificial Sequence
  Cyclic GFR-binding peptide
SPISILYKVGRKPKVLKYHYEYVRKKPKL

SEQ ID NO: 99677 - protein, 31 aa, Artificial Sequence
  Cyclic GFR-binding peptide
SAISVLYLEIVRKKPIFLKNYQEYVRKKPKL

SEQ ID NO: 99678 - protein, 29 aa, Artificial Sequence
  Cyclic GFR-binding peptide
SAISILYLVGRTPKVLKNYQEYVRKKPKL

SEQ ID NO: 99679 - protein, 29 aa, Artificial Sequence
  Cyclic GFR-binding peptide
NAISMLYFDENEKVVLKKYREYVRKKPKL

SEQ ID NO: 99680 - protein, 29 aa, Artificial Sequence
  Cyclic GFR-binding peptide
SAISVLYLDDMGVPTLKNYQEYVRKKPKL

SEQ ID NO: 99681 - protein, 29 aa, Artificial Sequence
  Cyclic GFR-binding peptide
NAISVLYFDDMGVPTLKKYREYVRKKPKL

SEQ ID NO: 99682 - protein, 29 aa, Artificial Sequence
  Cyclic GFR-binding peptide
NAISILYFVGRKPKVLKKYREYVRKKPKL

SEQ ID NO: 99683 - protein, 29 aa, Artificial Sequence
  Cyclic GFR-binding peptide
SAISMLYLDENEKVVLKNYQEYVRKKPKL

SEQ ID NO: 99684 - protein, 29 aa, Artificial Sequence
  Cyclic GFR-binding peptide
SPISVLYKDDSSNVILKYHYEYVRKKPKL

SEQ ID NO: 99685 - protein, 29 aa, Artificial Sequence
  Cyclic GFR-binding peptide
SAISILYLVGRKPKVLKNYQEYVRKKPKL

SEQ ID NO: 99686 - protein, 29 aa, Artificial Sequence
  Cyclic GFR-binding peptide
NAISVLYFDSSNNVILKKYREYVRKKPKL

SEQ ID NO: 99687 - protein, 29 aa, Artificial Sequence
  Cyclic GFR-binding peptide
NAISVLYFDDSSNVILKKYREYVRKKPKL

SEQ ID NO: 99688 - protein, 29 aa, Artificial Sequence
  Cyclic GFR-binding peptide
SATSILYYVGRTPKVLRKHREYVRKKPKL

SEQ ID NO: 99689 - protein, 31 aa, Artificial Sequence
  Cyclic GFR-binding peptide
SPISVLYKEIVRKKPIFLKYHYEYVRKKPKL

SEQ ID NO: 99690 - protein, 29 aa, Artificial Sequence
  Cyclic GFR-binding peptide
SATSILYYIGKTPKILRKHREYVRKKPKL

SEQ ID NO: 99691 - protein, 29 aa, Artificial Sequence
  Cyclic GFR-binding peptide
SATSVLYYDDMGVPTLRKHREYVRKKPKL

SEQ ID NO: 99692 - protein, 29 aa, Artificial Sequence
  Cyclic GFR-binding peptide
SPISVLYKDDMGVPTLKYHYEYVRKKPKL

SEQ ID NO: 99693 - protein, 29 aa, Artificial Sequence
  Cyclic GFR-binding peptide
SPISVLYKDSSNNVILKYHYEYVRKKPKL

SEQ ID NO: 99694 - protein, 29 aa, Artificial Sequence
  Cyclic GFR-binding peptide
SATSVLYYDSSNNVILRKHREYVRKKPKL

SEQ ID NO: 99695 - protein, 29 aa, Artificial Sequence
  Cyclic GFR-binding peptide
SPISILYKVGRTPKVLKYHYEYVRKKPKL

SEQ ID NO: 99696 - protein, 29 aa, Artificial Sequence
  Cyclic GFR-binding peptide
SATSVLYYDDSSNVILRKHREYVRKKPKL

SEQ ID NO: 99697 - protein, 29 aa, Artificial Sequence
  Cyclic GFR-binding peptide
SATSMLYYDEYDKVVLRKHREYVRKKPKL

SEQ ID NO: 99698 - protein, 29 aa, Artificial Sequence
  Cyclic GFR-binding peptide
SAISILYLIGKTPKILKNYQEYVRKKPKL

SEQ ID NO: 99699 - protein, 29 aa, Artificial Sequence
  Cyclic GFR-binding peptide
SAISMLYLDEYDKVVLKNYQEYVRKKPKL

SEQ ID NO: 99700 - protein, 29 aa, Artificial Sequence
  Cyclic GFR-binding peptide
SAISVLYLDDSSNVILKNYQEYVRKKPKL

SEQ ID NO: 99701 - protein, 29 aa, Artificial Sequence
  Cyclic GFR-binding peptide
EYVRKKPKLNSLQEVVKDYEDYYLMTLPE

SEQ ID NO: 99702 - protein, 29 aa, Artificial Sequence
  Cyclic GFR-binding peptide
EYVRKKPKLNSLQEIKPTKGIYYVIPLPE

SEQ ID NO: 99703 - protein, 29 aa, Artificial Sequence
  Cyclic GFR-binding peptide
EYVRKKPKLNSLQEVKPKRGVYYLITLPE

SEQ ID NO: 99704 - protein, 29 aa, Artificial Sequence
  Cyclic GFR-binding peptide
EYVRKKPKLNSLQEVKPTRGVYYVIPLPE

SEQ ID NO: 99705 - protein, 29 aa, Artificial Sequence
  Cyclic GFR-binding peptide
EYVRKKPKLEYQKYIVNSSDDIFLVSIPS

SEQ ID NO: 99706 - protein, 29 aa, Artificial Sequence
  Cyclic GFR-binding peptide
EYVRKKPKLEYQKYVKPTRGVIFLISIPS

SEQ ID NO: 99707 - protein, 29 aa, Artificial Sequence
  Cyclic GFR-binding peptide
EYVRKKPKLNSLQEVVKENEDYYLMTLPE

SEQ ID NO: 99708 - protein, 29 aa, Artificial Sequence
  Cyclic GFR-binding peptide
EYVRKKPKLNSLQEVVNNASDYYLITLPE

SEQ ID NO: 99709 - protein, 29 aa, Artificial Sequence
  Cyclic GFR-binding peptide
EYVRKKPKLNSLQEVKPKRGVYYVIPLPE

SEQ ID NO: 99710 - protein, 29 aa, Artificial Sequence
  Cyclic GFR-binding peptide
EYVRKKPKLNSLQEVVNNASDYYVIPLPE

SEQ ID NO: 99711 - protein, 29 aa, Artificial Sequence
  Cyclic GFR-binding peptide
EYVRKKPKLNSLQEVKPTRGVYYLITLPE

SEQ ID NO: 99712 - protein, 29 aa, Artificial Sequence
  Cyclic GFR-binding peptide
EYVRKKPKLEYQKYIKPTKGIIFLISIPS

SEQ ID NO: 99713 - protein, 29 aa, Artificial Sequence
  Cyclic GFR-binding peptide
EYVRKKPKLEYQKYVVNNASDIFLISIPS

SEQ ID NO: 99714 - protein, 29 aa, Artificial Sequence
  Cyclic GFR-binding peptide
EYVRKKPKLNSLQEIVNSSDDYYVVPLPE

SEQ ID NO: 99715 - protein, 29 aa, Artificial Sequence
  Cyclic GFR-binding peptide
EYVRKKPKLNSLQEVVKDYEDYYVMPLPE

SEQ ID NO: 99716 - protein, 29 aa, Artificial Sequence
  Cyclic GFR-binding peptide
EYVRKKPKLEYQKYVVKENEDIFLMSIPS

SEQ ID NO: 99717 - protein, 29 aa, Artificial Sequence
  Cyclic GFR-binding peptide
EYVRKKPKLNSLQEVVKENEDYYVMPLPE

SEQ ID NO: 99718 - protein, 29 aa, Artificial Sequence
  Cyclic GFR-binding peptide
EYVRKKPKLEYQKYVVKDYEDIFLMSIPS

SEQ ID NO: 99719 - protein, 29 aa, Artificial Sequence
  Cyclic GFR-binding peptide
EYVRKKPKLQYNKLVVNNASDLYLISIAS

SEQ ID NO: 99720 - protein, 29 aa, Artificial Sequence
  Cyclic GFR-binding peptide
EYVRKKPKLNSLQEIKPTKGIYYLITLPE

SEQ ID NO: 99721 - protein, 29 aa, Artificial Sequence
  Cyclic GFR-binding peptide
EYVRKKPKLEYQKYVKPKRGVIFLISIPS

SEQ ID NO: 99722 - protein, 29 aa, Artificial Sequence
  Cyclic GFR-binding peptide
EYVRKKPKLRYKKLVVNNASDFYLISIAN

SEQ ID NO: 99723 - protein, 29 aa, Artificial Sequence
  Cyclic GFR-binding peptide
EYVRKKPKLNSLQEIVNSSDDYYLVTLPE

SEQ ID NO: 99724 - protein, 29 aa, Artificial Sequence
  Cyclic GFR-binding peptide
EPLTMLYYDEYDKVVEQLSNEYVRKKPKL

SEQ ID NO: 99725 - protein, 29 aa, Artificial Sequence
  Cyclic GFR-binding peptide
EPLPIVYYIGKTPKIEQLSNEYVRKKPKL

SEQ ID NO: 99726 - protein, 29 aa, Artificial Sequence
  Cyclic GFR-binding peptide
EPLTILYYVGRKPKVEQLSNEYVRKKPKL

SEQ ID NO: 99727 - protein, 29 aa, Artificial Sequence
  Cyclic GFR-binding peptide
EPLPIVYYVGRTPKVEQLSNEYVRKKPKL

SEQ ID NO: 99728 - protein, 29 aa, Artificial Sequence
  Cyclic GFR-binding peptide
SPISVLFIDDSSNVIYKQYEEYVRKKPKL

SEQ ID NO: 99729 - protein, 29 aa, Artificial Sequence
  Cyclic GFR-binding peptide
SPISILFIVGRTPKVYKQYEEYVRKKPKL

SEQ ID NO: 99730 - protein, 29 aa, Artificial Sequence
  Cyclic GFR-binding peptide
EPLTMLYYDENEKVVEQLSNEYVRKKPKL

SEQ ID NO: 99731 - protein, 29 aa, Artificial Sequence
  Cyclic GFR-binding peptide
EPLTILYYDSANNVVEQLSNEYVRKKPKL

SEQ ID NO: 99732 - protein, 29 aa, Artificial Sequence
  Cyclic GFR-binding peptide
EPLPIVYYVGRKPKVEQLSNEYVRKKPKL

SEQ ID NO: 99733 - protein, 29 aa, Artificial Sequence
  Cyclic GFR-binding peptide
EPLPIVYYDSANNVVEQLSNEYVRKKPKL

SEQ ID NO: 99734 - protein, 29 aa, Artificial Sequence
  Cyclic GFR-binding peptide
EPLTILYYVGRTPKVEQLSNEYVRKKPKL

SEQ ID NO: 99735 - protein, 29 aa, Artificial Sequence
  Cyclic GFR-binding peptide
SPISILFIIGKTPKIYKQYEEYVRKKPKL

SEQ ID NO: 99736 - protein, 29 aa, Artificial Sequence
  Cyclic GFR-binding peptide
SPISILFIDSANNVVYKQYEEYVRKKPKL

SEQ ID NO: 99737 - protein, 29 aa, Artificial Sequence
  Cyclic GFR-binding peptide
EPLPVVYYDDSSNVIEQLSNEYVRKKPKL

SEQ ID NO: 99738 - protein, 29 aa, Artificial Sequence
  Cyclic GFR-binding peptide
EPLPMVYYDEYDKVVEQLSNEYVRKKPKL

SEQ ID NO: 99739 - protein, 29 aa, Artificial Sequence
  Cyclic GFR-binding peptide
SPISMLFIDENEKVVYKQYEEYVRKKPKL

SEQ ID NO: 99740 - protein, 29 aa, Artificial Sequence
  Cyclic GFR-binding peptide
EPLPMVYYDENEKVVEQLSNEYVRKKPKL

SEQ ID NO: 99741 - protein, 29 aa, Artificial Sequence
  Cyclic GFR-binding peptide
SPISMLFIDEYDKVVYKQYEEYVRKKPKL

SEQ ID NO: 99742 - protein, 29 aa, Artificial Sequence
  Cyclic GFR-binding peptide
SAISILYLDSANNVVLKNYQEYVRKKPKL

SEQ ID NO: 99743 - protein, 29 aa, Artificial Sequence
  Cyclic GFR-binding peptide
EPLTILYYIGKTPKIEQLSNEYVRKKPKL

SEQ ID NO: 99744 - protein, 29 aa, Artificial Sequence
  Cyclic GFR-binding peptide
SPISILFIVGRKPKVYKQYEEYVRKKPKL

SEQ ID NO: 99745 - protein, 29 aa, Artificial Sequence
  Cyclic GFR-binding peptide
NAISILYFDSANNVVLKKYREYVRKKPKL

SEQ ID NO: 99746 - protein, 29 aa, Artificial Sequence
  Cyclic GFR-binding peptide
EPLTVLYYDDSSNVIEQLSNEYVRKKPKL

SEQ ID NO: 99747 - protein, 31 aa, Artificial Sequence
  Cyclic GFR-binding peptide
EYVRKKPKLVTAKKLKPKKRVYEIKRVQVPR

SEQ ID NO: 99748 - protein, 31 aa, Artificial Sequence
  Cyclic GFR-binding peptide
EYVRKKPKLVQVEKLKPKKRVYEVKAVKVSR

SEQ ID NO: 99749 - protein, 31 aa, Artificial Sequence
  Cyclic GFR-binding peptide
EYVRKKPKLVQVEKFIPKKRVIEVKAVKVSR

SEQ ID NO: 99750 - protein, 31 aa, Artificial Sequence
  Cyclic GFR-binding peptide
EYVRKKPKLVQVEKHQGQHPKIRVKAMKVSR

SEQ ID NO: 99751 - protein, 31 aa, Artificial Sequence
  Cyclic GFR-binding peptide
EYVRKKPKLVTAKKHQGQHPKIRIKRMQVPR

SEQ ID NO: 99752 - protein, 31 aa, Artificial Sequence
  Cyclic GFR-binding peptide
EYVRKKPKLSMEGLLKPKKRVYEMIQVTINS

SEQ ID NO: 99753 - protein, 31 aa, Artificial Sequence
  Cyclic GFR-binding peptide
EYVRKKPKLSMEGIFIPKKRVIEMIQVTINS

SEQ ID NO: 99754 - protein, 31 aa, Artificial Sequence
  Cyclic GFR-binding peptide
EYVRKKPKLSMEGLHQGQHPKIRMIQMTINS

SEQ ID NO: 99755 - protein, 31 aa, Artificial Sequence
  Cyclic GFR-binding peptide
EYVRKKPKLSMEGILKPKKRVYEMIQVTINS

SEQ ID NO: 99756 - protein, 31 aa, Artificial Sequence
  Cyclic GFR-binding peptide
EYVRKKPKLSMEGLFIPKKRVIEMIQVTINS

SEQ ID NO: 99757 - protein, 31 aa, Artificial Sequence
  Cyclic GFR-binding peptide
EYVRKKPKLVTAKKFIPKKRVIEIKRVQVPR

SEQ ID NO: 99758 - protein, 31 aa, Artificial Sequence
  Cyclic GFR-binding peptide
EYVRKKPKLSMEGIHQGQHPKIRMIQMTINS

SEQ ID NO: 99759 - protein, 31 aa, Artificial Sequence
  Cyclic GFR-binding peptide
RPVQVRKIEYVRKKPKLKKATVEYVRKKPKL

SEQ ID NO: 99760 - protein, 31 aa, Artificial Sequence
  Cyclic GFR-binding peptide
RSVKVAKVEYVRKKPKLKEVQVEYVRKKPKL

SEQ ID NO: 99761 - protein, 31 aa, Artificial Sequence
  Cyclic GFR-binding peptide
RSVKVAKVEIVRKKPIFKEVQVEYVRKKPKL

SEQ ID NO: 99762 - protein, 31 aa, Artificial Sequence
  Cyclic GFR-binding peptide
RSVKMAKVRIKPHQGQHKEVQVEYVRKKPKL

SEQ ID NO: 99763 - protein, 31 aa, Artificial Sequence
  Cyclic GFR-binding peptide
RPVQMRKIRIKPHQGQHKKATVEYVRKKPKL

SEQ ID NO: 99764 - protein, 31 aa, Artificial Sequence
  Cyclic GFR-binding peptide
SNITVQIMEYVRKKPKLLGEMSEYVRKKPKL

SEQ ID NO: 99765 - protein, 31 aa, Artificial Sequence
  Cyclic GFR-binding peptide
SNITVQIMEIVRKKPIFIGEMSEYVRKKPKL

SEQ ID NO: 99766 - protein, 31 aa, Artificial Sequence
  Cyclic GFR-binding peptide
SNITMQIMRIKPHQGQHLGEMSEYVRKKPKL

SEQ ID NO: 99767 - protein, 31 aa, Artificial Sequence
  Cyclic GFR-binding peptide
SNITVQIMEYVRKKPKLIGEMSEYVRKKPKL

SEQ ID NO: 99768 - protein, 31 aa, Artificial Sequence
  Cyclic GFR-binding peptide
SNITVQIMEIVRKKPIFLGEMSEYVRKKPKL

SEQ ID NO: 99769 - protein, 31 aa, Artificial Sequence
  Cyclic GFR-binding peptide
RPVQVRKIEIVRKKPIFKKATVEYVRKKPKL

SEQ ID NO: 99770 - protein, 31 aa, Artificial Sequence
  Cyclic GFR-binding peptide
SNITMQIMRIKPHQGQHIGEMSEYVRKKPKL

SEQ ID NO: 99771 - protein, 29 aa, Artificial Sequence
  Cyclic GFR-binding peptide
EYVRKKPKLEYKFKVKPTRGVLYLISIPE

SEQ ID NO: 99772 - protein, 29 aa, Artificial Sequence
  Cyclic GFR-binding peptide
EYVRKKPKLEYKFKTPVGMDDLYLVSIPE

SEQ ID NO: 99773 - protein, 29 aa, Artificial Sequence
  Cyclic GFR-binding peptide
EYVRKKPKLEYQKYVKPKRGVIYLISIPS

SEQ ID NO: 99774 - protein, 29 aa, Artificial Sequence
  Cyclic GFR-binding peptide
EYVRKKPKLEYQKYVVKDYEDIYLMSIPS

SEQ ID NO: 99775 - protein, 29 aa, Artificial Sequence
  Cyclic GFR-binding peptide
EYVRKKPKLEYKFKIKPTKGILYLISIPE

SEQ ID NO: 99776 - protein, 29 aa, Artificial Sequence
  Cyclic GFR-binding peptide
EYVRKKPKLYHYKLYTVVGKDKYLISIPS

SEQ ID NO: 99777 - protein, 29 aa, Artificial Sequence
  Cyclic GFR-binding peptide
EYVRKKPKLRYKKLYTVVGKDFYLISIAN

SEQ ID NO: 99778 - protein, 29 aa, Artificial Sequence
  Cyclic GFR-binding peptide
EYVRKKPKLEYQKYVVNNAADIYLISIPS

SEQ ID NO: 99779 - protein, 29 aa, Artificial Sequence
  Cyclic GFR-binding peptide
EYVRKKPKLEYQKYVKPTRGVIYLISIPS

SEQ ID NO: 99780 - protein, 29 aa, Artificial Sequence
  Cyclic GFR-binding peptide
EYVRKKPKLEYQKYTPVGMDDIYLVSIPS

SEQ ID NO: 99781 - protein, 29 aa, Artificial Sequence
  Cyclic GFR-binding peptide
EYVRKKPKLEYKFKVVKDYEDLYLMSIPE

SEQ ID NO: 99782 - protein, 29 aa, Artificial Sequence
  Cyclic GFR-binding peptide
EYVRKKPKLEYKFKVVNNAADLYLISIPE

SEQ ID NO: 99783 - protein, 29 aa, Artificial Sequence
  Cyclic GFR-binding peptide
EYVRKKPKLEYQKYVVKENEDIYLMSIPS

SEQ ID NO: 99784 - protein, 29 aa, Artificial Sequence
  Cyclic GFR-binding peptide
EYVRKKPKLEYQKYIKPTKGIIYLISIPS

SEQ ID NO: 99785 - protein, 29 aa, Artificial Sequence
  Cyclic GFR-binding peptide
EYVRKKPKLRYKKLVVNNAADFYLISIAN

SEQ ID NO: 99786 - protein, 29 aa, Artificial Sequence
  Cyclic GFR-binding peptide
EYVRKKPKLYHYKLVVNNAADKYLISIPS

SEQ ID NO: 99787 - protein, 29 aa, Artificial Sequence
  Cyclic GFR-binding peptide
EYVRKKPKLEYKFKIVNNSSDLYLVSIPE

SEQ ID NO: 99788 - protein, 29 aa, Artificial Sequence
  Cyclic GFR-binding peptide
EYVRKKPKLEYQKYIVNSSDDIYLVSIPS

SEQ ID NO: 99789 - protein, 29 aa, Artificial Sequence
  Cyclic GFR-binding peptide
EYVRKKPKLEYKFKIVNSSDDLYLVSIPE

SEQ ID NO: 99790 - protein, 29 aa, Artificial Sequence
  Cyclic GFR-binding peptide
EYVRKKPKLEYKFKVKPKRGVLYLISIPE

SEQ ID NO: 99791 - protein, 29 aa, Artificial Sequence
  Cyclic GFR-binding peptide
EYVRKKPKLEYQKYYTVVGKDIYLISIPS

SEQ ID NO: 99792 - protein, 29 aa, Artificial Sequence
  Cyclic GFR-binding peptide
EYVRKKPKLEYKFKVVKENEDLYLMSIPE

SEQ ID NO: 99793 - protein, 29 aa, Artificial Sequence
  Cyclic GFR-binding peptide
EYVRKKPKLEYQKYIVNNSSDIYLVSIPS

SEQ ID NO: 99794 - protein, 29 aa, Artificial Sequence
  Cyclic GFR-binding peptide
EYVRKKPKLEYKFKYTVVGKDLYLISIPE

SEQ ID NO: 99795 - protein, 29 aa, Artificial Sequence
  Cyclic GFR-binding peptide
EPISILYLVGRTPKVKFKYEEYVRKKPKL

SEQ ID NO: 99796 - protein, 29 aa, Artificial Sequence
  Cyclic GFR-binding peptide
EPISVLYLDDMGVPTKFKYEEYVRKKPKL

SEQ ID NO: 99797 - protein, 29 aa, Artificial Sequence
  Cyclic GFR-binding peptide
SPISILYIVGRKPKVYKQYEEYVRKKPKL

SEQ ID NO: 99798 - protein, 29 aa, Artificial Sequence
  Cyclic GFR-binding peptide
SPISMLYIDEYDKVVYKQYEEYVRKKPKL

SEQ ID NO: 99799 - protein, 29 aa, Artificial Sequence
  Cyclic GFR-binding peptide
EPISILYLIGKTPKIKFKYEEYVRKKPKL

SEQ ID NO: 99800 - protein, 29 aa, Artificial Sequence
  Cyclic GFR-binding peptide
SPISILYKDKGVVTYLKYHYEYVRKKPKL

SEQ ID NO: 99801 - protein, 29 aa, Artificial Sequence
  Cyclic GFR-binding peptide
NAISILYFDKGVVTYLKKYREYVRKKPKL

SEQ ID NO: 99802 - protein, 29 aa, Artificial Sequence
  Cyclic GFR-binding peptide
SPISILYIDAANNVVYKQYEEYVRKKPKL

SEQ ID NO: 99803 - protein, 29 aa, Artificial Sequence
  Cyclic GFR-binding peptide
SPISILYIVGRTPKVYKQYEEYVRKKPKL

SEQ ID NO: 99804 - protein, 29 aa, Artificial Sequence
  Cyclic GFR-binding peptide
SPISVLYIDDMGVPTYKQYEEYVRKKPKL

SEQ ID NO: 99805 - protein, 29 aa, Artificial Sequence
  Cyclic GFR-binding peptide
EPISMLYLDEYDKVVKFKYEEYVRKKPKL

SEQ ID NO: 99806 - protein, 29 aa, Artificial Sequence
  Cyclic GFR-binding peptide
EPISILYLDAANNVVKFKYEEYVRKKPKL

SEQ ID NO: 99807 - protein, 29 aa, Artificial Sequence
  Cyclic GFR-binding peptide
SPISMLYIDENEKVVYKQYEEYVRKKPKL

SEQ ID NO: 99808 - protein, 29 aa, Artificial Sequence
  Cyclic GFR-binding peptide
SPISILYIIGKTPKIYKQYEEYVRKKPKL

SEQ ID NO: 99809 - protein, 29 aa, Artificial Sequence
  Cyclic GFR-binding peptide
NAISILYFDAANNVVLKKYREYVRKKPKL

SEQ ID NO: 99810 - protein, 29 aa, Artificial Sequence
  Cyclic GFR-binding peptide
SPISILYKDAANNVVLKYHYEYVRKKPKL

SEQ ID NO: 99811 - protein, 29 aa, Artificial Sequence
  Cyclic GFR-binding peptide
EPISVLYLDSSNNVIKFKYEEYVRKKPKL

SEQ ID NO: 99812 - protein, 29 aa, Artificial Sequence
  Cyclic GFR-binding peptide
SPISVLYIDDSSNVIYKQYEEYVRKKPKL

SEQ ID NO: 99813 - protein, 29 aa, Artificial Sequence
  Cyclic GFR-binding peptide
EPISVLYLDDSSNVIKFKYEEYVRKKPKL

SEQ ID NO: 99814 - protein, 29 aa, Artificial Sequence
  Cyclic GFR-binding peptide
EPISILYLVGRKPKVKFKYEEYVRKKPKL

SEQ ID NO: 99815 - protein, 29 aa, Artificial Sequence
  Cyclic GFR-binding peptide
SPISILYIDKGVVTYYKQYEEYVRKKPKL

SEQ ID NO: 99816 - protein, 29 aa, Artificial Sequence
  Cyclic GFR-binding peptide
EPISMLYLDENEKVVKFKYEEYVRKKPKL

SEQ ID NO: 99817 - protein, 29 aa, Artificial Sequence
  Cyclic GFR-binding peptide
SPISVLYIDSSNNVIYKQYEEYVRKKPKL

SEQ ID NO: 99818 - protein, 29 aa, Artificial Sequence
  Cyclic GFR-binding peptide
EPISILYLDKGVVTYKFKYEEYVRKKPKL

SEQ ID NO: 99819 - protein, 29 aa, Artificial Sequence
  Cyclic GFR-binding peptide
EYVRKKPKLPIKGYIIQQKDNFYLMNIPS

SEQ ID NO: 99820 - protein, 29 aa, Artificial Sequence
  Cyclic GFR-binding peptide
EYVRKKPKLPIKGYVVKDYEDFYLMNIPS

SEQ ID NO: 99821 - protein, 29 aa, Artificial Sequence
  Cyclic GFR-binding peptide
EYVRKKPKLPIKGYIVNSSDDFYLVNIPS

SEQ ID NO: 99822 - protein, 29 aa, Artificial Sequence
  Cyclic GFR-binding peptide
EYVRKKPKLPIKGYVVNNAADFYLINIPS

SEQ ID NO: 99823 - protein, 29 aa, Artificial Sequence
  Cyclic GFR-binding peptide
EYVRKKPKLPIKGYYTVVGKDFYLINIPS

SEQ ID NO: 99824 - protein, 29 aa, Artificial Sequence
  Cyclic GFR-binding peptide
EYVRKKPKLPIKGYLLVRGNDFYLMNIPS

SEQ ID NO: 99825 - protein, 29 aa, Artificial Sequence
  Cyclic GFR-binding peptide
EYVRKKPKLPIKGYVVKENEDFYLMNIPS

SEQ ID NO: 99826 - protein, 29 aa, Artificial Sequence
  Cyclic GFR-binding peptide
EYVRKKPKLPIKGYVVNNASDFYLINIPS

SEQ ID NO: 99827 - protein, 29 aa, Artificial Sequence
  Cyclic GFR-binding peptide
EYVRKKPKLPIKGYTPVGMDDFYLVNIPS

SEQ ID NO: 99828 - protein, 29 aa, Artificial Sequence
  Cyclic GFR-binding peptide
EYVRKKPKLPIKGYIVNNSSDFYLVNIPS

SEQ ID NO: 99829 - protein, 29 aa, Artificial Sequence
  Cyclic GFR-binding peptide
SPINMLYFNDKQQIIYGKIPEYVRKKPKL

SEQ ID NO: 99830 - protein, 29 aa, Artificial Sequence
  Cyclic GFR-binding peptide
SPINMLYFDEYDKVVYGKIPEYVRKKPKL

SEQ ID NO: 99831 - protein, 29 aa, Artificial Sequence
  Cyclic GFR-binding peptide
SPINVLYFDDSSNVIYGKIPEYVRKKPKL

SEQ ID NO: 99832 - protein, 29 aa, Artificial Sequence
  Cyclic GFR-binding peptide
SPINILYFDAANNVVYGKIPEYVRKKPKL

SEQ ID NO: 99833 - protein, 29 aa, Artificial Sequence
  Cyclic GFR-binding peptide
SPINILYFDKGVVTYYGKIPEYVRKKPKL

SEQ ID NO: 99834 - protein, 29 aa, Artificial Sequence
  Cyclic GFR-binding peptide
SPINMLYFDNGRVLLYGKIPEYVRKKPKL

SEQ ID NO: 99835 - protein, 29 aa, Artificial Sequence
  Cyclic GFR-binding peptide
SPINMLYFDENEKVVYGKIPEYVRKKPKL

SEQ ID NO: 99836 - protein, 29 aa, Artificial Sequence
  Cyclic GFR-binding peptide
SPINILYFDSANNVVYGKIPEYVRKKPKL

SEQ ID NO: 99837 - protein, 29 aa, Artificial Sequence
  Cyclic GFR-binding peptide
SPINVLYFDDMGVPTYGKIPEYVRKKPKL

SEQ ID NO: 99838 - protein, 29 aa, Artificial Sequence
  Cyclic GFR-binding peptide
SPINVLYFDSSNNVIYGKIPEYVRKKPKL

SEQ ID NO: 99839 - protein, 29 aa, Artificial Sequence
  Cyclic GFR-binding peptide
EYVRKKPKLEYQKYVVNNASDIYLISIPS

SEQ ID NO: 99840 - protein, 29 aa, Artificial Sequence
  Cyclic GFR-binding peptide
EYVRKKPKLEYQKYIIQQKDNIYLMSIPS

SEQ ID NO: 99841 - protein, 29 aa, Artificial Sequence
  Cyclic GFR-binding peptide
EYVRKKPKLEYQKYLLVRGNDIYLMSIPS

SEQ ID NO: 99842 - protein, 29 aa, Artificial Sequence
  Cyclic GFR-binding peptide
SPISILYIDSANNVVYKQYEEYVRKKPKL

SEQ ID NO: 99843 - protein, 29 aa, Artificial Sequence
  Cyclic GFR-binding peptide
SPISMLYINDKQQIIYKQYEEYVRKKPKL

SEQ ID NO: 99844 - protein, 29 aa, Artificial Sequence
  Cyclic GFR-binding peptide
SPISMLYIDNGRVLLYKQYEEYVRKKPKL

SEQ ID NO: 99845 - protein, 29 aa, Artificial Sequence
  Cyclic GFR-binding peptide
EYVRKKPKLPYVKLYTVVGKDFFLISLSS

SEQ ID NO: 99846 - protein, 29 aa, Artificial Sequence
  Cyclic GFR-binding peptide
EYVRKKPKLPYVKLIKPTKGIFFLISLSS

SEQ ID NO: 99847 - protein, 29 aa, Artificial Sequence
  Cyclic GFR-binding peptide
EYVRKKPKLPYVKLIIQQKDNFFLMSLSS

SEQ ID NO: 99848 - protein, 29 aa, Artificial Sequence
  Cyclic GFR-binding peptide
EYVRKKPKLPYVKLIVNSSDDFFLVSLSS

SEQ ID NO: 99849 - protein, 29 aa, Artificial Sequence
  Cyclic GFR-binding peptide
EYVRKKPKLPYVKLVKPKRGVFFLISLSS

SEQ ID NO: 99850 - protein, 29 aa, Artificial Sequence
  Cyclic GFR-binding peptide
EYVRKKPKLPYVKLVKPTRGVFFLISLSS

SEQ ID NO: 99851 - protein, 29 aa, Artificial Sequence
  Cyclic GFR-binding peptide
EYVRKKPKLPYVKLTPVGMDDFFLVSLSS

SEQ ID NO: 99852 - protein, 31 aa, Artificial Sequence
  Cyclic GFR-binding peptide
EYVRKKPKLPYVKLHQGQHPKIRFFLMSLSS

SEQ ID NO: 99853 - protein, 29 aa, Artificial Sequence
  Cyclic GFR-binding peptide
EYVRKKPKLPYVKLVVNKNEDFFLISLSS

SEQ ID NO: 99854 - protein, 29 aa, Artificial Sequence
  Cyclic GFR-binding peptide
EYVRKKPKLPYVKLVVNNASDFFLISLSS

SEQ ID NO: 99855 - protein, 29 aa, Artificial Sequence
  Cyclic GFR-binding peptide
EYVRKKPKLPYVKLVVKENEDFFLMSLSS

SEQ ID NO: 99856 - protein, 29 aa, Artificial Sequence
  Cyclic GFR-binding peptide
EYVRKKPKLPYVKLIVNNSSDFFLVSLSS

SEQ ID NO: 99857 - protein, 31 aa, Artificial Sequence
  Cyclic GFR-binding peptide
EYVRKKPKLPYVKLLKPKKRVYEFFLVSLSS

SEQ ID NO: 99858 - protein, 29 aa, Artificial Sequence
  Cyclic GFR-binding peptide
EYVRKKPKLPYVKLLLVRGNDFFLMSLSS

SEQ ID NO: 99859 - protein, 29 aa, Artificial Sequence
  Cyclic GFR-binding peptide
EYVRKKPKLPYVKLVVKDYEDFFLMSLSS

SEQ ID NO: 99860 - protein, 29 aa, Artificial Sequence
  Cyclic GFR-binding peptide
EYVRKKPKLPYVKLVVNNAADFFLISLSS

SEQ ID NO: 99861 - protein, 29 aa, Artificial Sequence
  Cyclic GFR-binding peptide
SSLSILFFDKGVVTYLKVYPEYVRKKPKL

SEQ ID NO: 99862 - protein, 29 aa, Artificial Sequence
  Cyclic GFR-binding peptide
SSLSILFFIGKTPKILKVYPEYVRKKPKL

SEQ ID NO: 99863 - protein, 29 aa, Artificial Sequence
  Cyclic GFR-binding peptide
SSLSMLFFNDKQQIILKVYPEYVRKKPKL

SEQ ID NO: 99864 - protein, 29 aa, Artificial Sequence
  Cyclic GFR-binding peptide
SSLSVLFFDDSSNVILKVYPEYVRKKPKL

SEQ ID NO: 99865 - protein, 29 aa, Artificial Sequence
  Cyclic GFR-binding peptide
SSLSILFFVGRKPKVLKVYPEYVRKKPKL

SEQ ID NO: 99866 - protein, 29 aa, Artificial Sequence
  Cyclic GFR-binding peptide
SSLSILFFVGRTPKVLKVYPEYVRKKPKL

SEQ ID NO: 99867 - protein, 29 aa, Artificial Sequence
  Cyclic GFR-binding peptide
SSLSVLFFDDMGVPTLKVYPEYVRKKPKL

SEQ ID NO: 99868 - protein, 31 aa, Artificial Sequence
  Cyclic GFR-binding peptide
SSLSMLFFRIKPHQGQHLKVYPEYVRKKPKL

SEQ ID NO: 99869 - protein, 29 aa, Artificial Sequence
  Cyclic GFR-binding peptide
SSLSILFFDENKNVVLKVYPEYVRKKPKL

SEQ ID NO: 99870 - protein, 29 aa, Artificial Sequence
  Cyclic GFR-binding peptide
SSLSILFFDSANNVVLKVYPEYVRKKPKL

SEQ ID NO: 99871 - protein, 29 aa, Artificial Sequence
  Cyclic GFR-binding peptide
SSLSMLFFDENEKVVLKVYPEYVRKKPKL

SEQ ID NO: 99872 - protein, 29 aa, Artificial Sequence
  Cyclic GFR-binding peptide
SSLSVLFFDSSNNVILKVYPEYVRKKPKL

SEQ ID NO: 99873 - protein, 31 aa, Artificial Sequence
  Cyclic GFR-binding peptide
SSLSVLFFEYVRKKPKLLKVYPEYVRKKPKL

SEQ ID NO: 99874 - protein, 29 aa, Artificial Sequence
  Cyclic GFR-binding peptide
SSLSMLFFDNGRVLLLKVYPEYVRKKPKL

SEQ ID NO: 99875 - protein, 29 aa, Artificial Sequence
  Cyclic GFR-binding peptide
SSLSMLFFDEYDKVVLKVYPEYVRKKPKL

SEQ ID NO: 99876 - protein, 29 aa, Artificial Sequence
  Cyclic GFR-binding peptide
SSLSILFFDAANNVVLKVYPEYVRKKPKL

SEQ ID NO: 99877 - protein, 29 aa, Artificial Sequence
  Cyclic GFR-binding peptide
EYVRKKPKLSMEGIIVNSSDDMIQVTINS

SEQ ID NO: 99878 - protein, 29 aa, Artificial Sequence
  Cyclic GFR-binding peptide
EYVRKKPKLVTAKKVVKENEDIKRMQVPR

SEQ ID NO: 99879 - protein, 29 aa, Artificial Sequence
  Cyclic GFR-binding peptide
EYVRKKPKLSMEGIVVKDYEDMIQMTINS

SEQ ID NO: 99880 - protein, 29 aa, Artificial Sequence
  Cyclic GFR-binding peptide
EYVRKKPKLVTAKKIKPTKGIIKRIQVPR

SEQ ID NO: 99881 - protein, 29 aa, Artificial Sequence
  Cyclic GFR-binding peptide
EYVRKKPKLSMEGIVKPTRGVMIQITINS

SEQ ID NO: 99882 - protein, 31 aa, Artificial Sequence
  Cyclic GFR-binding peptide
EYVRKKPKLNSLQEFIPKKRVIEYYVVPLPE

SEQ ID NO: 99883 - protein, 29 aa, Artificial Sequence
  Cyclic GFR-binding peptide
EYVRKKPKLVQVEKVKPKRGVVKAIKVSR

SEQ ID NO: 99884 - protein, 29 aa, Artificial Sequence
  Cyclic GFR-binding peptide
EYVRKKPKLVQVEKVVKENEDVKAMKVSR

SEQ ID NO: 99885 - protein, 29 aa, Artificial Sequence
  Cyclic GFR-binding peptide
EYVRKKPKLVTAKKIVNSSDDIKRVQVPR

SEQ ID NO: 99886 - protein, 29 aa, Artificial Sequence
  Cyclic GFR-binding peptide
EYVRKKPKLVQVEKIKPTKGIVKAIKVSR

SEQ ID NO: 99887 - protein, 31 aa, Artificial Sequence
  Cyclic GFR-binding peptide
EYVRKKPKLNSLQEFIPKKRVIEYYLVTLPE

SEQ ID NO: 99888 - protein, 29 aa, Artificial Sequence
  Cyclic GFR-binding peptide
EYVRKKPKLVQVEKIVNSSDDVKAVKVSR

SEQ ID NO: 99889 - protein, 29 aa, Artificial Sequence
  Cyclic GFR-binding peptide
EYVRKKPKLVTAKKVKPKRGVIKRIQVPR

SEQ ID NO: 99890 - protein, 29 aa, Artificial Sequence
  Cyclic GFR-binding peptide
EYVRKKPKLVQVEKVKPTRGVVKAIKVSR

SEQ ID NO: 99891 - protein, 29 aa, Artificial Sequence
  Cyclic GFR-binding peptide
EYVRKKPKLVTAKKVKPTRGVIKRIQVPR

SEQ ID NO: 99892 - protein, 31 aa, Artificial Sequence
  Cyclic GFR-binding peptide
EYVRKKPKLNSLQELKPKKRVYEYYLVTLPE

SEQ ID NO: 99893 - protein, 29 aa, Artificial Sequence
  Cyclic GFR-binding peptide
EYVRKKPKLSMEGIVKPKRGVMIQITINS

SEQ ID NO: 99894 - protein, 29 aa, Artificial Sequence
  Cyclic GFR-binding peptide
EYVRKKPKLSMEGIVVKENEDMIQMTINS

SEQ ID NO: 99895 - protein, 29 aa, Artificial Sequence
  Cyclic GFR-binding peptide
EYVRKKPKLSMEGIIKPTKGIMIQITINS

SEQ ID NO: 99896 - protein, 31 aa, Artificial Sequence
  Cyclic GFR-binding peptide
EYVRKKPKLNSLQEHQGQHPKIRYYLMTLPE

SEQ ID NO: 99897 - protein, 29 aa, Artificial Sequence
  Cyclic GFR-binding peptide
EYVRKKPKLVTAKKVVKDYEDIKRMQVPR

SEQ ID NO: 99898 - protein, 31 aa, Artificial Sequence
  Cyclic GFR-binding peptide
EYVRKKPKLNSLQEHQGQHPKIRYYVMPLPE

SEQ ID NO: 99899 - protein, 31 aa, Artificial Sequence
  Cyclic GFR-binding peptide
EYVRKKPKLNSLQELKPKKRVYEYYVVPLPE

SEQ ID NO: 99900 - protein, 29 aa, Artificial Sequence
  Cyclic GFR-binding peptide
EYVRKKPKLVQVEKVVKDYEDVKAMKVSR

SEQ ID NO: 99901 - protein, 29 aa, Artificial Sequence
  Cyclic GFR-binding peptide
SNITVQIMDDSSNVIIGEMSEYVRKKPKL

SEQ ID NO: 99902 - protein, 29 aa, Artificial Sequence
  Cyclic GFR-binding peptide
RPVQMRKIDENEKVVKKATVEYVRKKPKL

SEQ ID NO: 99903 - protein, 29 aa, Artificial Sequence
  Cyclic GFR-binding peptide
SNITMQIMDEYDKVVIGEMSEYVRKKPKL

SEQ ID NO: 99904 - protein, 29 aa, Artificial Sequence
  Cyclic GFR-binding peptide
RPVQIRKIIGKTPKIKKATVEYVRKKPKL

SEQ ID NO: 99905 - protein, 29 aa, Artificial Sequence
  Cyclic GFR-binding peptide
SNITIQIMVGRTPKVIGEMSEYVRKKPKL

SEQ ID NO: 99906 - protein, 31 aa, Artificial Sequence
  Cyclic GFR-binding peptide
EPLPVVYYEIVRKKPIFEQLSNEYVRKKPKL

SEQ ID NO: 99907 - protein, 29 aa, Artificial Sequence
  Cyclic GFR-binding peptide
RSVKIAKVVGRKPKVKEVQVEYVRKKPKL

SEQ ID NO: 99908 - protein, 29 aa, Artificial Sequence
  Cyclic GFR-binding peptide
RSVKMAKVDENEKVVKEVQVEYVRKKPKL

SEQ ID NO: 99909 - protein, 29 aa, Artificial Sequence
  Cyclic GFR-binding peptide
RPVQVRKIDDSSNVIKKATVEYVRKKPKL

SEQ ID NO: 99910 - protein, 29 aa, Artificial Sequence
  Cyclic GFR-binding peptide
RSVKIAKVIGKTPKIKEVQVEYVRKKPKL

SEQ ID NO: 99911 - protein, 31 aa, Artificial Sequence
  Cyclic GFR-binding peptide
EPLTVLYYEIVRKKPIFEQLSNEYVRKKPKL

SEQ ID NO: 99912 - protein, 29 aa, Artificial Sequence
  Cyclic GFR-binding peptide
RSVKVAKVDDSSNVIKEVQVEYVRKKPKL

SEQ ID NO: 99913 - protein, 29 aa, Artificial Sequence
  Cyclic GFR-binding peptide
RPVQIRKIVGRKPKVKKATVEYVRKKPKL

SEQ ID NO: 99914 - protein, 29 aa, Artificial Sequence
  Cyclic GFR-binding peptide
RSVKIAKVVGRTPKVKEVQVEYVRKKPKL

SEQ ID NO: 99915 - protein, 29 aa, Artificial Sequence
  Cyclic GFR-binding peptide
RPVQIRKIVGRTPKVKKATVEYVRKKPKL

SEQ ID NO: 99916 - protein, 31 aa, Artificial Sequence
  Cyclic GFR-binding peptide
EPLTVLYYEYVRKKPKLEQLSNEYVRKKPKL

SEQ ID NO: 99917 - protein, 29 aa, Artificial Sequence
  Cyclic GFR-binding peptide
SNITIQIMVGRKPKVIGEMSEYVRKKPKL

SEQ ID NO: 99918 - protein, 29 aa, Artificial Sequence
  Cyclic GFR-binding peptide
SNITMQIMDENEKVVIGEMSEYVRKKPKL

SEQ ID NO: 99919 - protein, 29 aa, Artificial Sequence
  Cyclic GFR-binding peptide
SNITIQIMIGKTPKIIGEMSEYVRKKPKL

SEQ ID NO: 99920 - protein, 31 aa, Artificial Sequence
  Cyclic GFR-binding peptide
EPLTMLYYRIKPHQGQHEQLSNEYVRKKPKL

SEQ ID NO: 99921 - protein, 29 aa, Artificial Sequence
  Cyclic GFR-binding peptide
RPVQMRKIDEYDKVVKKATVEYVRKKPKL

SEQ ID NO: 99922 - protein, 31 aa, Artificial Sequence
  Cyclic GFR-binding peptide
EPLPMVYYRIKPHQGQHEQLSNEYVRKKPKL

SEQ ID NO: 99923 - protein, 31 aa, Artificial Sequence
  Cyclic GFR-binding peptide
EPLPVVYYEYVRKKPKLEQLSNEYVRKKPKL

SEQ ID NO: 99924 - protein, 29 aa, Artificial Sequence
  Cyclic GFR-binding peptide
RSVKMAKVDEYDKVVKEVQVEYVRKKPKL

SEQ ID NO: 99925 - protein, 29 aa, Artificial Sequence
  Cyclic GFR-binding peptide
EYVRKKPKLRYKKLIIQQKDNFYLMSIAN

SEQ ID NO: 99926 - protein, 29 aa, Artificial Sequence
  Cyclic GFR-binding peptide
EYVRKKPKLRYKKLLLVRGNDFYLMSIAN

SEQ ID NO: 99927 - protein, 29 aa, Artificial Sequence
  Cyclic GFR-binding peptide
NAISMLYFNDKQQIILKKYREYVRKKPKL

SEQ ID NO: 99928 - protein, 29 aa, Artificial Sequence
  Cyclic GFR-binding peptide
NAISMLYFDNGRVLLLKKYREYVRKKPKL

SEQ ID NO: 99929 - protein, 29 aa, Artificial Sequence
  Cyclic GFR-binding peptide
EYVRKKPKLEYKFKVVNKNEDLYLISIPE

SEQ ID NO: 99930 - protein, 29 aa, Artificial Sequence
  Cyclic GFR-binding peptide
EYVRKKPKLPIKGYVKPTRGVFYLINIPS

SEQ ID NO: 99931 - protein, 29 aa, Artificial Sequence
  Cyclic GFR-binding peptide
EYVRKKPKLEYKFKLLVRGNDLYLMSIPE

SEQ ID NO: 99932 - protein, 29 aa, Artificial Sequence
  Cyclic GFR-binding peptide
EYVRKKPKLYHYKLVVNKNEDKYLISIPS

SEQ ID NO: 99933 - protein, 29 aa, Artificial Sequence
  Cyclic GFR-binding peptide
EYVRKKPKLRHKRLLLVRGNDYYLMSTAS

SEQ ID NO: 99934 - protein, 29 aa, Artificial Sequence
  Cyclic GFR-binding peptide
EYVRKKPKLYHYKLLLVRGNDKYLMSIPS

SEQ ID NO: 99935 - protein, 29 aa, Artificial Sequence
  Cyclic GFR-binding peptide
EYVRKKPKLRHKRLVVNKNEDYYLISTAS

SEQ ID NO: 99936 - protein, 29 aa, Artificial Sequence
  Cyclic GFR-binding peptide
EYVRKKPKLRYKKLVVNKNEDFYLISIAN

SEQ ID NO: 99937 - protein, 29 aa, Artificial Sequence
  Cyclic GFR-binding peptide
EYVRKKPKLPIKGYVVNKNEDFYLINIPS

SEQ ID NO: 99938 - protein, 29 aa, Artificial Sequence
  Cyclic GFR-binding peptide
EYVRKKPKLPIKGYIKPTKGIFYLINIPS

SEQ ID NO: 99939 - protein, 29 aa, Artificial Sequence
  Cyclic GFR-binding peptide
EYVRKKPKLRHKRLYTVVGKDYYLISTAS

SEQ ID NO: 99940 - protein, 29 aa, Artificial Sequence
  Cyclic GFR-binding peptide
EYVRKKPKLEYKFKVVNNASDLYLISIPE

SEQ ID NO: 99941 - protein, 29 aa, Artificial Sequence
  Cyclic GFR-binding peptide
EYVRKKPKLRHKRLIIQQKDNYYLMSTAS

SEQ ID NO: 99942 - protein, 29 aa, Artificial Sequence
  Cyclic GFR-binding peptide
EYVRKKPKLEYKFKIIQQKDNLYLMSIPE

SEQ ID NO: 99943 - protein, 29 aa, Artificial Sequence
  Cyclic GFR-binding peptide
EYVRKKPKLPIKGYVKPKRGVFYLINIPS

SEQ ID NO: 99944 - protein, 29 aa, Artificial Sequence
  Cyclic GFR-binding peptide
EYVRKKPKLRHKRLVVNNASDYYLISTAS

SEQ ID NO: 99945 - protein, 29 aa, Artificial Sequence
  Cyclic GFR-binding peptide
EYVRKKPKLYHYKLVVNNASDKYLISIPS

SEQ ID NO: 99946 - protein, 29 aa, Artificial Sequence
  Cyclic GFR-binding peptide
EYVRKKPKLYHYKLIIQQKDNKYLMSIPS

SEQ ID NO: 99947 - protein, 29 aa, Artificial Sequence
  Cyclic GFR-binding peptide
EYVRKKPKLRHKRLVVNNAADYYLISTAS

SEQ ID NO: 99948 - protein, 29 aa, Artificial Sequence
  Cyclic GFR-binding peptide
EPISILYLDENKNVVKFKYEEYVRKKPKL

SEQ ID NO: 99949 - protein, 29 aa, Artificial Sequence
  Cyclic GFR-binding peptide
SPINILYFVGRTPKVYGKIPEYVRKKPKL

SEQ ID NO: 99950 - protein, 29 aa, Artificial Sequence
  Cyclic GFR-binding peptide
EPISMLYLDNGRVLLKFKYEEYVRKKPKL

SEQ ID NO: 99951 - protein, 29 aa, Artificial Sequence
  Cyclic GFR-binding peptide
SPISILYKDENKNVVLKYHYEYVRKKPKL

SEQ ID NO: 99952 - protein, 29 aa, Artificial Sequence
  Cyclic GFR-binding peptide
SATSMLYYDNGRVLLLRKHREYVRKKPKL

SEQ ID NO: 99953 - protein, 29 aa, Artificial Sequence
  Cyclic GFR-binding peptide
SPISMLYKDNGRVLLLKYHYEYVRKKPKL

SEQ ID NO: 99954 - protein, 29 aa, Artificial Sequence
  Cyclic GFR-binding peptide
SATSILYYDENKNVVLRKHREYVRKKPKL

SEQ ID NO: 99955 - protein, 29 aa, Artificial Sequence
  Cyclic GFR-binding peptide
NAISILYFDENKNVVLKKYREYVRKKPKL

SEQ ID NO: 99956 - protein, 29 aa, Artificial Sequence
  Cyclic GFR-binding peptide
SPINILYFDENKNVVYGKIPEYVRKKPKL

SEQ ID NO: 99957 - protein, 29 aa, Artificial Sequence
  Cyclic GFR-binding peptide
SPINILYFIGKTPKIYGKIPEYVRKKPKL

SEQ ID NO: 99958 - protein, 29 aa, Artificial Sequence
  Cyclic GFR-binding peptide
SATSILYYDKGVVTYLRKHREYVRKKPKL

SEQ ID NO: 99959 - protein, 29 aa, Artificial Sequence
  Cyclic GFR-binding peptide
EPISILYLDSANNVVKFKYEEYVRKKPKL

SEQ ID NO: 99960 - protein, 29 aa, Artificial Sequence
  Cyclic GFR-binding peptide
SATSMLYYNDKQQIILRKHREYVRKKPKL

SEQ ID NO: 99961 - protein, 29 aa, Artificial Sequence
  Cyclic GFR-binding peptide
EPISMLYLNDKQQIIKFKYEEYVRKKPKL

SEQ ID NO: 99962 - protein, 29 aa, Artificial Sequence
  Cyclic GFR-binding peptide
SPINILYFVGRKPKVYGKIPEYVRKKPKL

SEQ ID NO: 99963 - protein, 29 aa, Artificial Sequence
  Cyclic GFR-binding peptide
SATSILYYDSANNVVLRKHREYVRKKPKL

SEQ ID NO: 99964 - protein, 29 aa, Artificial Sequence
  Cyclic GFR-binding peptide
SPISILYKDSANNVVLKYHYEYVRKKPKL

SEQ ID NO: 99965 - protein, 29 aa, Artificial Sequence
  Cyclic GFR-binding peptide
SPISMLYKNDKQQIILKYHYEYVRKKPKL

SEQ ID NO: 99966 - protein, 29 aa, Artificial Sequence
  Cyclic GFR-binding peptide
SATSILYYDAANNVVLRKHREYVRKKPKL

SEQ ID NO: 99967 - protein, 29 aa, Artificial Sequence
  Cyclic GFR-binding peptide
EYVRKKPKLSMEGIIIQQKDNMIQMTINS

SEQ ID NO: 99968 - protein, 29 aa, Artificial Sequence
  Cyclic GFR-binding peptide
EYVRKKPKLSMEGLVKPKRGVMIQITINS

SEQ ID NO: 99969 - protein, 29 aa, Artificial Sequence
  Cyclic GFR-binding peptide
EYVRKKPKLSMEGLVVNNASDMIQITINS

SEQ ID NO: 99970 - protein, 29 aa, Artificial Sequence
  Cyclic GFR-binding peptide
EYVRKKPKLSMEGILLVRGNDMIQMTINS

SEQ ID NO: 99971 - protein, 29 aa, Artificial Sequence
  Cyclic GFR-binding peptide
EYVRKKPKLSMEGLIKPTKGIMIQITINS

SEQ ID NO: 99972 - protein, 29 aa, Artificial Sequence
  Cyclic GFR-binding peptide
EYVRKKPKLSMEGLIVNSSDDMIQVTINS

SEQ ID NO: 99973 - protein, 29 aa, Artificial Sequence
  Cyclic GFR-binding peptide
EYVRKKPKLSMEGIVVNNASDMIQITINS

SEQ ID NO: 99974 - protein, 29 aa, Artificial Sequence
  Cyclic GFR-binding peptide
EYVRKKPKLSMEGLVVNNAADMIQITINS

SEQ ID NO: 99975 - protein, 29 aa, Artificial Sequence
  Cyclic GFR-binding peptide
EYVRKKPKLSMEGLLLVRGNDMIQMTINS

SEQ ID NO: 99976 - protein, 29 aa, Artificial Sequence
  Cyclic GFR-binding peptide
EYVRKKPKLSMEGLIIQQKDNMIQMTINS

SEQ ID NO: 99977 - protein, 29 aa, Artificial Sequence
  Cyclic GFR-binding peptide
EYVRKKPKLSMEGIVVNNAADMIQITINS

SEQ ID NO: 99978 - protein, 29 aa, Artificial Sequence
  Cyclic GFR-binding peptide
EYVRKKPKLSMEGLVKPTRGVMIQITINS

SEQ ID NO: 99979 - protein, 29 aa, Artificial Sequence
  Cyclic GFR-binding peptide
SNITMQIMNDKQQIIIGEMSEYVRKKPKL

SEQ ID NO: 99980 - protein, 29 aa, Artificial Sequence
  Cyclic GFR-binding peptide
SNITIQIMVGRKPKVLGEMSEYVRKKPKL

SEQ ID NO: 99981 - protein, 29 aa, Artificial Sequence
  Cyclic GFR-binding peptide
SNITIQIMDSANNVVLGEMSEYVRKKPKL

SEQ ID NO: 99982 - protein, 29 aa, Artificial Sequence
  Cyclic GFR-binding peptide
SNITMQIMDNGRVLLIGEMSEYVRKKPKL

SEQ ID NO: 99983 - protein, 29 aa, Artificial Sequence
  Cyclic GFR-binding peptide
SNITIQIMIGKTPKILGEMSEYVRKKPKL

SEQ ID NO: 99984 - protein, 29 aa, Artificial Sequence
  Cyclic GFR-binding peptide
SNITVQIMDDSSNVILGEMSEYVRKKPKL

SEQ ID NO: 99985 - protein, 29 aa, Artificial Sequence
  Cyclic GFR-binding peptide
SNITIQIMDSANNVVIGEMSEYVRKKPKL

SEQ ID NO: 99986 - protein, 29 aa, Artificial Sequence
  Cyclic GFR-binding peptide
SNITIQIMDAANNVVLGEMSEYVRKKPKL

SEQ ID NO: 99987 - protein, 29 aa, Artificial Sequence
  Cyclic GFR-binding peptide
SNITMQIMDNGRVLLLGEMSEYVRKKPKL

SEQ ID NO: 99988 - protein, 29 aa, Artificial Sequence
  Cyclic GFR-binding peptide
SNITMQIMNDKQQIILGEMSEYVRKKPKL

SEQ ID NO: 99989 - protein, 29 aa, Artificial Sequence
  Cyclic GFR-binding peptide
SNITIQIMDAANNVVIGEMSEYVRKKPKL

SEQ ID NO: 99990 - protein, 29 aa, Artificial Sequence
  Cyclic GFR-binding peptide
SNITIQIMVGRTPKVLGEMSEYVRKKPKL

SEQ ID NO: 99991 - protein, 29 aa, Artificial Sequence
  Cyclic GFR-binding peptide
EYVRKKPKLQYNKLVVNKNEDLYLISIAS

SEQ ID NO: 99992 - protein, 29 aa, Artificial Sequence
  Cyclic GFR-binding peptide
EYVRKKPKLQYNKLVVNNAADLYLISIAS

SEQ ID NO: 99993 - protein, 29 aa, Artificial Sequence
  Cyclic GFR-binding peptide
EYVRKKPKLQYNKLIIQQKDNLYLMSIAS

SEQ ID NO: 99994 - protein, 29 aa, Artificial Sequence
  Cyclic GFR-binding peptide
EYVRKKPKLQYNKLLLVRGNDLYLMSIAS

SEQ ID NO: 99995 - protein, 29 aa, Artificial Sequence
  Cyclic GFR-binding peptide
EYVRKKPKLQYNKLYTVVGKDLYLISIAS

SEQ ID NO: 99996 - protein, 29 aa, Artificial Sequence
  Cyclic GFR-binding peptide
SAISILYLDENKNVVLKNYQEYVRKKPKL

SEQ ID NO: 99997 - protein, 29 aa, Artificial Sequence
  Cyclic GFR-binding peptide
SAISILYLDAANNVVLKNYQEYVRKKPKL

SEQ ID NO: 99998 - protein, 29 aa, Artificial Sequence
  Cyclic GFR-binding peptide
SAISMLYLNDKQQIILKNYQEYVRKKPKL

SEQ ID NO: 99999 - protein, 29 aa, Artificial Sequence
  Cyclic GFR-binding peptide
SAISMLYLDNGRVLLLKNYQEYVRKKPKL

SEQ ID NO: 100000 - protein, 29 aa, Artificial Sequence
  Cyclic GFR-binding peptide
SAISILYLDKGVVTYLKNYQEYVRKKPKL

SEQ ID NO: 100001 - protein, 29 aa, Artificial Sequence
  Cyclic GFR-binding peptide
EIVRKKPIFRYKKLIKPTKGIFYLISIAN

SEQ ID NO: 100002 - protein, 31 aa, Artificial Sequence
  Cyclic GFR-binding peptide
EIVRKKPIFRHKRLFIPKKRVIEYYLVSTAS

SEQ ID NO: 100003 - protein, 29 aa, Artificial Sequence
  Cyclic GFR-binding peptide
EIVRKKPIFYHYKLVVKDYEDKYLMSIPS

SEQ ID NO: 100004 - protein, 29 aa, Artificial Sequence
  Cyclic GFR-binding peptide
EIVRKKPIFQYNKLIVNNSSDLYLVSIAS

SEQ ID NO: 100005 - protein, 29 aa, Artificial Sequence
  Cyclic GFR-binding peptide
EIVRKKPIFRYKKLVVKDYEDFYLMSIAN

SEQ ID NO: 100006 - protein, 29 aa, Artificial Sequence
  Cyclic GFR-binding peptide
EIVRKKPIFRYKKLVKPTRGVFYLISIAN

SEQ ID NO: 100007 - protein, 29 aa, Artificial Sequence
  Cyclic GFR-binding peptide
EIVRKKPIFRHKRLVVKENEDYYLMSTAS

SEQ ID NO: 100008 - protein, 29 aa, Artificial Sequence
  Cyclic GFR-binding peptide
EIVRKKPIFYHYKLIKPTKGIKYLISIPS

SEQ ID NO: 100009 - protein, 31 aa, Artificial Sequence
  Cyclic GFR-binding peptide
EIVRKKPIFRYKKLFIPKKRVIEFYLVSIAN

SEQ ID NO: 100010 - protein, 29 aa, Artificial Sequence
  Cyclic GFR-binding peptide
EIVRKKPIFYHYKLVVKENEDKYLMSIPS

SEQ ID NO: 100011 - protein, 29 aa, Artificial Sequence
  Cyclic GFR-binding peptide
EIVRKKPIFRHKRLVKPKRGVYYLISTAS

SEQ ID NO: 100012 - protein, 29 aa, Artificial Sequence
  Cyclic GFR-binding peptide
EIVRKKPIFYHYKLVKPKRGVKYLISIPS

SEQ ID NO: 100013 - protein, 31 aa, Artificial Sequence
  Cyclic GFR-binding peptide
EIVRKKPIFQYNKLFIPKKRVIELYLVSIAS

SEQ ID NO: 100014 - protein, 29 aa, Artificial Sequence
  Cyclic GFR-binding peptide
EIVRKKPIFQYNKLVKPTRGVLYLISIAS

SEQ ID NO: 100015 - protein, 29 aa, Artificial Sequence
  Cyclic GFR-binding peptide
EIVRKKPIFRYKKLVVKENEDFYLMSIAN

SEQ ID NO: 100016 - protein, 29 aa, Artificial Sequence
  Cyclic GFR-binding peptide
EIVRKKPIFQYNKLTPVGMDDLYLVSIAS

SEQ ID NO: 100017 - protein, 29 aa, Artificial Sequence
  Cyclic GFR-binding peptide
EIVRKKPIFRYKKLTPVGMDDFYLVSIAN

SEQ ID NO: 100018 - protein, 29 aa, Artificial Sequence
  Cyclic GFR-binding peptide
EIVRKKPIFRYKKLVKPKRGVFYLISIAN

SEQ ID NO: 100019 - protein, 29 aa, Artificial Sequence
  Cyclic GFR-binding peptide
EIVRKKPIFQYNKLVVKENEDLYLMSIAS

SEQ ID NO: 100020 - protein, 29 aa, Artificial Sequence
  Cyclic GFR-binding peptide
EIVRKKPIFYHYKLIVNSSDDKYLVSIPS

SEQ ID NO: 100021 - protein, 29 aa, Artificial Sequence
  Cyclic GFR-binding peptide
EIVRKKPIFQYNKLVKPKRGVLYLISIAS

SEQ ID NO: 100022 - protein, 29 aa, Artificial Sequence
  Cyclic GFR-binding peptide
EIVRKKPIFRYKKLIVNNSSDFYLVSIAN

SEQ ID NO: 100023 - protein, 29 aa, Artificial Sequence
  Cyclic GFR-binding peptide
EIVRKKPIFRYKKLIVNSSDDFYLVSIAN

SEQ ID NO: 100024 - protein, 29 aa, Artificial Sequence
  Cyclic GFR-binding peptide
EIVRKKPIFRHKRLVKPTRGVYYLISTAS

SEQ ID NO: 100025 - protein, 31 aa, Artificial Sequence
  Cyclic GFR-binding peptide
EIVRKKPIFYHYKLFIPKKRVIEKYLVSIPS

SEQ ID NO: 100026 - protein, 29 aa, Artificial Sequence
  Cyclic GFR-binding peptide
EIVRKKPIFRHKRLIKPTKGIYYLISTAS

SEQ ID NO: 100027 - protein, 29 aa, Artificial Sequence
  Cyclic GFR-binding peptide
EIVRKKPIFRHKRLTPVGMDDYYLVSTAS

SEQ ID NO: 100028 - protein, 29 aa, Artificial Sequence
  Cyclic GFR-binding peptide
EIVRKKPIFYHYKLTPVGMDDKYLVSIPS

SEQ ID NO: 100029 - protein, 29 aa, Artificial Sequence
  Cyclic GFR-binding peptide
EIVRKKPIFYHYKLIVNNSSDKYLVSIPS

SEQ ID NO: 100030 - protein, 29 aa, Artificial Sequence
  Cyclic GFR-binding peptide
EIVRKKPIFRHKRLIVNNSSDYYLVSTAS

SEQ ID NO: 100031 - protein, 29 aa, Artificial Sequence
  Cyclic GFR-binding peptide
EIVRKKPIFYHYKLVKPTRGVKYLISIPS

SEQ ID NO: 100032 - protein, 29 aa, Artificial Sequence
  Cyclic GFR-binding peptide
EIVRKKPIFRHKRLIVNSSDDYYLVSTAS

SEQ ID NO: 100033 - protein, 29 aa, Artificial Sequence
  Cyclic GFR-binding peptide
EIVRKKPIFRHKRLVVKDYEDYYLMSTAS

SEQ ID NO: 100034 - protein, 29 aa, Artificial Sequence
  Cyclic GFR-binding peptide
EIVRKKPIFQYNKLIKPTKGILYLISIAS

SEQ ID NO: 100035 - protein, 29 aa, Artificial Sequence
  Cyclic GFR-binding peptide
EIVRKKPIFQYNKLVVKDYEDLYLMSIAS

SEQ ID NO: 100036 - protein, 29 aa, Artificial Sequence
  Cyclic GFR-binding peptide
EIVRKKPIFQYNKLIVNSSDDLYLVSIAS

SEQ ID NO: 100037 - protein, 29 aa, Artificial Sequence
  Cyclic GFR-binding peptide
NAISILYFIGKTPKILKKYREIVRKKPIF

SEQ ID NO: 100038 - protein, 31 aa, Artificial Sequence
  Cyclic GFR-binding peptide
SATSVLYYEIVRKKPIFLRKHREIVRKKPIF

SEQ ID NO: 100039 - protein, 29 aa, Artificial Sequence
  Cyclic GFR-binding peptide
SPISMLYKDEYDKVVLKYHYEIVRKKPIF

SEQ ID NO: 100040 - protein, 29 aa, Artificial Sequence
  Cyclic GFR-binding peptide
SAISVLYLDSSNNVILKNYQEIVRKKPIF

SEQ ID NO: 100041 - protein, 29 aa, Artificial Sequence
  Cyclic GFR-binding peptide
NAISMLYFDEYDKVVLKKYREIVRKKPIF

SEQ ID NO: 100042 - protein, 29 aa, Artificial Sequence
  Cyclic GFR-binding peptide
NAISILYFVGRTPKVLKKYREIVRKKPIF

SEQ ID NO: 100043 - protein, 29 aa, Artificial Sequence
  Cyclic GFR-binding peptide
SATSMLYYDENEKVVLRKHREIVRKKPIF

SEQ ID NO: 100044 - protein, 29 aa, Artificial Sequence
  Cyclic GFR-binding peptide
SPISILYKIGKTPKILKYHYEIVRKKPIF

SEQ ID NO: 100045 - protein, 31 aa, Artificial Sequence
  Cyclic GFR-binding peptide
NAISVLYFEIVRKKPIFLKKYREIVRKKPIF

SEQ ID NO: 100046 - protein, 29 aa, Artificial Sequence
  Cyclic GFR-binding peptide
SPISMLYKDENEKVVLKYHYEIVRKKPIF

SEQ ID NO: 100047 - protein, 29 aa, Artificial Sequence
  Cyclic GFR-binding peptide
SATSILYYVGRKPKVLRKHREIVRKKPIF

SEQ ID NO: 100048 - protein, 29 aa, Artificial Sequence
  Cyclic GFR-binding peptide
SPISILYKVGRKPKVLKYHYEIVRKKPIF

SEQ ID NO: 100049 - protein, 29 aa, Artificial Sequence
  Cyclic GFR-binding peptide
SAISILYLVGRTPKVLKNYQEIVRKKPIF

SEQ ID NO: 100050 - protein, 29 aa, Artificial Sequence
  Cyclic GFR-binding peptide
NAISMLYFDENEKVVLKKYREIVRKKPIF

SEQ ID NO: 100051 - protein, 29 aa, Artificial Sequence
  Cyclic GFR-binding peptide
SAISVLYLDDMGVPTLKNYQEIVRKKPIF

SEQ ID NO: 100052 - protein, 29 aa, Artificial Sequence
  Cyclic GFR-binding peptide
NAISVLYFDDMGVPTLKKYREIVRKKPIF

SEQ ID NO: 100053 - protein, 29 aa, Artificial Sequence
  Cyclic GFR-binding peptide
NAISILYFVGRKPKVLKKYREIVRKKPIF

SEQ ID NO: 100054 - protein, 29 aa, Artificial Sequence
  Cyclic GFR-binding peptide
SAISMLYLDENEKVVLKNYQEIVRKKPIF

SEQ ID NO: 100055 - protein, 29 aa, Artificial Sequence
  Cyclic GFR-binding peptide
SPISVLYKDDSSNVILKYHYEIVRKKPIF

SEQ ID NO: 100056 - protein, 29 aa, Artificial Sequence
  Cyclic GFR-binding peptide
SAISILYLVGRKPKVLKNYQEIVRKKPIF

SEQ ID NO: 100057 - protein, 29 aa, Artificial Sequence
  Cyclic GFR-binding peptide
NAISVLYFDSSNNVILKKYREIVRKKPIF

SEQ ID NO: 100058 - protein, 29 aa, Artificial Sequence
  Cyclic GFR-binding peptide
NAISVLYFDDSSNVILKKYREIVRKKPIF

SEQ ID NO: 100059 - protein, 29 aa, Artificial Sequence
  Cyclic GFR-binding peptide
SATSILYYVGRTPKVLRKHREIVRKKPIF

SEQ ID NO: 100060 - protein, 31 aa, Artificial Sequence
  Cyclic GFR-binding peptide
SPISVLYKEIVRKKPIFLKYHYEIVRKKPIF

SEQ ID NO: 100061 - protein, 29 aa, Artificial Sequence
  Cyclic GFR-binding peptide
SATSILYYIGKTPKILRKHREIVRKKPIF

SEQ ID NO: 100062 - protein, 29 aa, Artificial Sequence
  Cyclic GFR-binding peptide
SATSVLYYDDMGVPTLRKHREIVRKKPIF

SEQ ID NO: 100063 - protein, 29 aa, Artificial Sequence
  Cyclic GFR-binding peptide
SPISVLYKDDMGVPTLKYHYEIVRKKPIF

SEQ ID NO: 100064 - protein, 29 aa, Artificial Sequence
  Cyclic GFR-binding peptide
SPISVLYKDSSNNVILKYHYEIVRKKPIF

SEQ ID NO: 100065 - protein, 29 aa, Artificial Sequence
  Cyclic GFR-binding peptide
SATSVLYYDSSNNVILRKHREIVRKKPIF

SEQ ID NO: 100066 - protein, 29 aa, Artificial Sequence
  Cyclic GFR-binding peptide
SPISILYKVGRTPKVLKYHYEIVRKKPIF

SEQ ID NO: 100067 - protein, 29 aa, Artificial Sequence
  Cyclic GFR-binding peptide
SATSVLYYDDSSNVILRKHREIVRKKPIF

SEQ ID NO: 100068 - protein, 29 aa, Artificial Sequence
  Cyclic GFR-binding peptide
SATSMLYYDEYDKVVLRKHREIVRKKPIF

SEQ ID NO: 100069 - protein, 29 aa, Artificial Sequence
  Cyclic GFR-binding peptide
SAISILYLIGKTPKILKNYQEIVRKKPIF

SEQ ID NO: 100070 - protein, 29 aa, Artificial Sequence
  Cyclic GFR-binding peptide
SAISMLYLDEYDKVVLKNYQEIVRKKPIF

SEQ ID NO: 100071 - protein, 29 aa, Artificial Sequence
  Cyclic GFR-binding peptide
SAISVLYLDDSSNVILKNYQEIVRKKPIF

SEQ ID NO: 100072 - protein, 29 aa, Artificial Sequence
  Cyclic GFR-binding peptide
EIVRKKPIFNSLQEVVKDYEDYYLMTLPE

SEQ ID NO: 100073 - protein, 29 aa, Artificial Sequence
  Cyclic GFR-binding peptide
EIVRKKPIFNSLQEIKPTKGIYYVIPLPE

SEQ ID NO: 100074 - protein, 29 aa, Artificial Sequence
  Cyclic GFR-binding peptide
EIVRKKPIFNSLQEVKPKRGVYYLITLPE

SEQ ID NO: 100075 - protein, 29 aa, Artificial Sequence
  Cyclic GFR-binding peptide
EIVRKKPIFNSLQEVKPTRGVYYVIPLPE

SEQ ID NO: 100076 - protein, 29 aa, Artificial Sequence
  Cyclic GFR-binding peptide
EIVRKKPIFEYQKYIVNSSDDIFLVSIPS

SEQ ID NO: 100077 - protein, 29 aa, Artificial Sequence
  Cyclic GFR-binding peptide
EIVRKKPIFEYQKYVKPTRGVIFLISIPS

SEQ ID NO: 100078 - protein, 29 aa, Artificial Sequence
  Cyclic GFR-binding peptide
EIVRKKPIFNSLQEVVKENEDYYLMTLPE

SEQ ID NO: 100079 - protein, 29 aa, Artificial Sequence
  Cyclic GFR-binding peptide
EIVRKKPIFNSLQEVVNNASDYYLITLPE

SEQ ID NO: 100080 - protein, 29 aa, Artificial Sequence
  Cyclic GFR-binding peptide
EIVRKKPIFNSLQEVKPKRGVYYVIPLPE

SEQ ID NO: 100081 - protein, 29 aa, Artificial Sequence
  Cyclic GFR-binding peptide
EIVRKKPIFNSLQEVVNNASDYYVIPLPE

SEQ ID NO: 100082 - protein, 29 aa, Artificial Sequence
  Cyclic GFR-binding peptide
EIVRKKPIFNSLQEVKPTRGVYYLITLPE

SEQ ID NO: 100083 - protein, 29 aa, Artificial Sequence
  Cyclic GFR-binding peptide
EIVRKKPIFEYQKYIKPTKGIIFLISIPS

SEQ ID NO: 100084 - protein, 29 aa, Artificial Sequence
  Cyclic GFR-binding peptide
EIVRKKPIFEYQKYVVNNASDIFLISIPS

SEQ ID NO: 100085 - protein, 29 aa, Artificial Sequence
  Cyclic GFR-binding peptide
EIVRKKPIFNSLQEIVNSSDDYYVVPLPE

SEQ ID NO: 100086 - protein, 29 aa, Artificial Sequence
  Cyclic GFR-binding peptide
EIVRKKPIFNSLQEVVKDYEDYYVMPLPE

SEQ ID NO: 100087 - protein, 29 aa, Artificial Sequence
  Cyclic GFR-binding peptide
EIVRKKPIFEYQKYVVKENEDIFLMSIPS

SEQ ID NO: 100088 - protein, 29 aa, Artificial Sequence
  Cyclic GFR-binding peptide
EIVRKKPIFNSLQEVVKENEDYYVMPLPE

SEQ ID NO: 100089 - protein, 29 aa, Artificial Sequence
  Cyclic GFR-binding peptide
EIVRKKPIFEYQKYVVKDYEDIFLMSIPS

SEQ ID NO: 100090 - protein, 29 aa, Artificial Sequence
  Cyclic GFR-binding peptide
EIVRKKPIFQYNKLVVNNASDLYLISIAS

SEQ ID NO: 100091 - protein, 29 aa, Artificial Sequence
  Cyclic GFR-binding peptide
EIVRKKPIFNSLQEIKPTKGIYYLITLPE

SEQ ID NO: 100092 - protein, 29 aa, Artificial Sequence
  Cyclic GFR-binding peptide
EIVRKKPIFEYQKYVKPKRGVIFLISIPS

SEQ ID NO: 100093 - protein, 29 aa, Artificial Sequence
  Cyclic GFR-binding peptide
EIVRKKPIFRYKKLVVNNASDFYLISIAN

SEQ ID NO: 100094 - protein, 29 aa, Artificial Sequence
  Cyclic GFR-binding peptide
EIVRKKPIFNSLQEIVNSSDDYYLVTLPE

SEQ ID NO: 100095 - protein, 29 aa, Artificial Sequence
  Cyclic GFR-binding peptide
EPLTMLYYDEYDKVVEQLSNEIVRKKPIF

SEQ ID NO: 100096 - protein, 29 aa, Artificial Sequence
  Cyclic GFR-binding peptide
EPLPIVYYIGKTPKIEQLSNEIVRKKPIF

SEQ ID NO: 100097 - protein, 29 aa, Artificial Sequence
  Cyclic GFR-binding peptide
EPLTILYYVGRKPKVEQLSNEIVRKKPIF

SEQ ID NO: 100098 - protein, 29 aa, Artificial Sequence
  Cyclic GFR-binding peptide
EPLPIVYYVGRTPKVEQLSNEIVRKKPIF

SEQ ID NO: 100099 - protein, 29 aa, Artificial Sequence
  Cyclic GFR-binding peptide
SPISVLFIDDSSNVIYKQYEEIVRKKPIF

SEQ ID NO: 100100 - protein, 29 aa, Artificial Sequence
  Cyclic GFR-binding peptide
SPISILFIVGRTPKVYKQYEEIVRKKPIF

SEQ ID NO: 100101 - protein, 29 aa, Artificial Sequence
  Cyclic GFR-binding peptide
EPLTMLYYDENEKVVEQLSNEIVRKKPIF

SEQ ID NO: 100102 - protein, 29 aa, Artificial Sequence
  Cyclic GFR-binding peptide
EPLTILYYDSANNVVEQLSNEIVRKKPIF

SEQ ID NO: 100103 - protein, 29 aa, Artificial Sequence
  Cyclic GFR-binding peptide
EPLPIVYYVGRKPKVEQLSNEIVRKKPIF

SEQ ID NO: 100104 - protein, 29 aa, Artificial Sequence
  Cyclic GFR-binding peptide
EPLPIVYYDSANNVVEQLSNEIVRKKPIF

SEQ ID NO: 100105 - protein, 29 aa, Artificial Sequence
  Cyclic GFR-binding peptide
EPLTILYYVGRTPKVEQLSNEIVRKKPIF

SEQ ID NO: 100106 - protein, 29 aa, Artificial Sequence
  Cyclic GFR-binding peptide
SPISILFIIGKTPKIYKQYEEIVRKKPIF

SEQ ID NO: 100107 - protein, 29 aa, Artificial Sequence
  Cyclic GFR-binding peptide
SPISILFIDSANNVVYKQYEEIVRKKPIF

SEQ ID NO: 100108 - protein, 29 aa, Artificial Sequence
  Cyclic GFR-binding peptide
EPLPVVYYDDSSNVIEQLSNEIVRKKPIF

SEQ ID NO: 100109 - protein, 29 aa, Artificial Sequence
  Cyclic GFR-binding peptide
EPLPMVYYDEYDKVVEQLSNEIVRKKPIF

SEQ ID NO: 100110 - protein, 29 aa, Artificial Sequence
  Cyclic GFR-binding peptide
SPISMLFIDENEKVVYKQYEEIVRKKPIF

SEQ ID NO: 100111 - protein, 29 aa, Artificial Sequence
  Cyclic GFR-binding peptide
EPLPMVYYDENEKVVEQLSNEIVRKKPIF

SEQ ID NO: 100112 - protein, 29 aa, Artificial Sequence
  Cyclic GFR-binding peptide
SPISMLFIDEYDKVVYKQYEEIVRKKPIF

SEQ ID NO: 100113 - protein, 29 aa, Artificial Sequence
  Cyclic GFR-binding peptide
SAISILYLDSANNVVLKNYQEIVRKKPIF

SEQ ID NO: 100114 - protein, 29 aa, Artificial Sequence
  Cyclic GFR-binding peptide
EPLTILYYIGKTPKIEQLSNEIVRKKPIF

SEQ ID NO: 100115 - protein, 29 aa, Artificial Sequence
  Cyclic GFR-binding peptide
SPISILFIVGRKPKVYKQYEEIVRKKPIF

SEQ ID NO: 100116 - protein, 29 aa, Artificial Sequence
  Cyclic GFR-binding peptide
NAISILYFDSANNVVLKKYREIVRKKPIF

SEQ ID NO: 100117 - protein, 29 aa, Artificial Sequence
  Cyclic GFR-binding peptide
EPLTVLYYDDSSNVIEQLSNEIVRKKPIF

SEQ ID NO: 100118 - protein, 31 aa, Artificial Sequence
  Cyclic GFR-binding peptide
EIVRKKPIFVTAKKLKPKKRVYEIKRVQVPR

SEQ ID NO: 100119 - protein, 31 aa, Artificial Sequence
  Cyclic GFR-binding peptide
EIVRKKPIFVQVEKLKPKKRVYEVKAVKVSR

SEQ ID NO: 100120 - protein, 31 aa, Artificial Sequence
  Cyclic GFR-binding peptide
EIVRKKPIFVQVEKFIPKKRVIEVKAVKVSR

SEQ ID NO: 100121 - protein, 31 aa, Artificial Sequence
  Cyclic GFR-binding peptide
EIVRKKPIFVQVEKHQGQHPKIRVKAMKVSR

SEQ ID NO: 100122 - protein, 31 aa, Artificial Sequence
  Cyclic GFR-binding peptide
EIVRKKPIFVTAKKHQGQHPKIRIKRMQVPR

SEQ ID NO: 100123 - protein, 31 aa, Artificial Sequence
  Cyclic GFR-binding peptide
EIVRKKPIFSMEGLLKPKKRVYEMIQVTINS

SEQ ID NO: 100124 - protein, 31 aa, Artificial Sequence
  Cyclic GFR-binding peptide
EIVRKKPIFSMEGIFIPKKRVIEMIQVTINS

SEQ ID NO: 100125 - protein, 31 aa, Artificial Sequence
  Cyclic GFR-binding peptide
EIVRKKPIFSMEGLHQGQHPKIRMIQMTINS

SEQ ID NO: 100126 - protein, 31 aa, Artificial Sequence
  Cyclic GFR-binding peptide
EIVRKKPIFSMEGILKPKKRVYEMIQVTINS

SEQ ID NO: 100127 - protein, 31 aa, Artificial Sequence
  Cyclic GFR-binding peptide
EIVRKKPIFSMEGLFIPKKRVIEMIQVTINS

SEQ ID NO: 100128 - protein, 31 aa, Artificial Sequence
  Cyclic GFR-binding peptide
EIVRKKPIFVTAKKFIPKKRVIEIKRVQVPR

SEQ ID NO: 100129 - protein, 31 aa, Artificial Sequence
  Cyclic GFR-binding peptide
EIVRKKPIFSMEGIHQGQHPKIRMIQMTINS

SEQ ID NO: 100130 - protein, 31 aa, Artificial Sequence
  Cyclic GFR-binding peptide
RPVQVRKIEYVRKKPKLKKATVEIVRKKPIF

SEQ ID NO: 100131 - protein, 31 aa, Artificial Sequence
  Cyclic GFR-binding peptide
RSVKVAKVEYVRKKPKLKEVQVEIVRKKPIF

SEQ ID NO: 100132 - protein, 31 aa, Artificial Sequence
  Cyclic GFR-binding peptide
RSVKVAKVEIVRKKPIFKEVQVEIVRKKPIF

SEQ ID NO: 100133 - protein, 31 aa, Artificial Sequence
  Cyclic GFR-binding peptide
RSVKMAKVRIKPHQGQHKEVQVEIVRKKPIF

SEQ ID NO: 100134 - protein, 31 aa, Artificial Sequence
  Cyclic GFR-binding peptide
RPVQMRKIRIKPHQGQHKKATVEIVRKKPIF

SEQ ID NO: 100135 - protein, 31 aa, Artificial Sequence
  Cyclic GFR-binding peptide
SNITVQIMEYVRKKPKLLGEMSEIVRKKPIF

SEQ ID NO: 100136 - protein, 31 aa, Artificial Sequence
  Cyclic GFR-binding peptide
SNITVQIMEIVRKKPIFIGEMSEIVRKKPIF

SEQ ID NO: 100137 - protein, 31 aa, Artificial Sequence
  Cyclic GFR-binding peptide
SNITMQIMRIKPHQGQHLGEMSEIVRKKPIF

SEQ ID NO: 100138 - protein, 31 aa, Artificial Sequence
  Cyclic GFR-binding peptide
SNITVQIMEYVRKKPKLIGEMSEIVRKKPIF

SEQ ID NO: 100139 - protein, 31 aa, Artificial Sequence
  Cyclic GFR-binding peptide
SNITVQIMEIVRKKPIFLGEMSEIVRKKPIF

SEQ ID NO: 100140 - protein, 31 aa, Artificial Sequence
  Cyclic GFR-binding peptide
RPVQVRKIEIVRKKPIFKKATVEIVRKKPIF

SEQ ID NO: 100141 - protein, 31 aa, Artificial Sequence
  Cyclic GFR-binding peptide
SNITMQIMRIKPHQGQHIGEMSEIVRKKPIF

SEQ ID NO: 100142 - protein, 29 aa, Artificial Sequence
  Cyclic GFR-binding peptide
EIVRKKPIFEYKFKVKPTRGVLYLISIPE

SEQ ID NO: 100143 - protein, 29 aa, Artificial Sequence
  Cyclic GFR-binding peptide
EIVRKKPIFEYKFKTPVGMDDLYLVSIPE

SEQ ID NO: 100144 - protein, 29 aa, Artificial Sequence
  Cyclic GFR-binding peptide
EIVRKKPIFEYQKYVKPKRGVIYLISIPS

SEQ ID NO: 100145 - protein, 29 aa, Artificial Sequence
  Cyclic GFR-binding peptide
EIVRKKPIFEYQKYVVKDYEDIYLMSIPS

SEQ ID NO: 100146 - protein, 29 aa, Artificial Sequence
  Cyclic GFR-binding peptide
EIVRKKPIFEYKFKIKPTKGILYLISIPE

SEQ ID NO: 100147 - protein, 29 aa, Artificial Sequence
  Cyclic GFR-binding peptide
EIVRKKPIFYHYKLYTVVGKDKYLISIPS

SEQ ID NO: 100148 - protein, 29 aa, Artificial Sequence
  Cyclic GFR-binding peptide
EIVRKKPIFRYKKLYTVVGKDFYLISIAN

SEQ ID NO: 100149 - protein, 29 aa, Artificial Sequence
  Cyclic GFR-binding peptide
EIVRKKPIFEYQKYVVNNAADIYLISIPS

SEQ ID NO: 100150 - protein, 29 aa, Artificial Sequence
  Cyclic GFR-binding peptide
EIVRKKPIFEYQKYVKPTRGVIYLISIPS

SEQ ID NO: 100151 - protein, 29 aa, Artificial Sequence
  Cyclic GFR-binding peptide
EIVRKKPIFEYQKYTPVGMDDIYLVSIPS

SEQ ID NO: 100152 - protein, 29 aa, Artificial Sequence
  Cyclic GFR-binding peptide
EIVRKKPIFEYKFKVVKDYEDLYLMSIPE

SEQ ID NO: 100153 - protein, 29 aa, Artificial Sequence
  Cyclic GFR-binding peptide
EIVRKKPIFEYKFKVVNNAADLYLISIPE

SEQ ID NO: 100154 - protein, 29 aa, Artificial Sequence
  Cyclic GFR-binding peptide
EIVRKKPIFEYQKYVVKENEDIYLMSIPS

SEQ ID NO: 100155 - protein, 29 aa, Artificial Sequence
  Cyclic GFR-binding peptide
EIVRKKPIFEYQKYIKPTKGIIYLISIPS

SEQ ID NO: 100156 - protein, 29 aa, Artificial Sequence
  Cyclic GFR-binding peptide
EIVRKKPIFRYKKLVVNNAADFYLISIAN

SEQ ID NO: 100157 - protein, 29 aa, Artificial Sequence
  Cyclic GFR-binding peptide
EIVRKKPIFYHYKLVVNNAADKYLISIPS

SEQ ID NO: 100158 - protein, 29 aa, Artificial Sequence
  Cyclic GFR-binding peptide
EIVRKKPIFEYKFKIVNNSSDLYLVSIPE

SEQ ID NO: 100159 - protein, 29 aa, Artificial Sequence
  Cyclic GFR-binding peptide
EIVRKKPIFEYQKYIVNSSDDIYLVSIPS

SEQ ID NO: 100160 - protein, 29 aa, Artificial Sequence
  Cyclic GFR-binding peptide
EIVRKKPIFEYKFKIVNSSDDLYLVSIPE

SEQ ID NO: 100161 - protein, 29 aa, Artificial Sequence
  Cyclic GFR-binding peptide
EIVRKKPIFEYKFKVKPKRGVLYLISIPE

SEQ ID NO: 100162 - protein, 29 aa, Artificial Sequence
  Cyclic GFR-binding peptide
EIVRKKPIFEYQKYYTVVGKDIYLISIPS

SEQ ID NO: 100163 - protein, 29 aa, Artificial Sequence
  Cyclic GFR-binding peptide
EIVRKKPIFEYKFKVVKENEDLYLMSIPE

SEQ ID NO: 100164 - protein, 29 aa, Artificial Sequence
  Cyclic GFR-binding peptide
EIVRKKPIFEYQKYIVNNSSDIYLVSIPS

SEQ ID NO: 100165 - protein, 29 aa, Artificial Sequence
  Cyclic GFR-binding peptide
EIVRKKPIFEYKFKYTVVGKDLYLISIPE

SEQ ID NO: 100166 - protein, 29 aa, Artificial Sequence
  Cyclic GFR-binding peptide
EPISILYLVGRTPKVKFKYEEIVRKKPIF

SEQ ID NO: 100167 - protein, 29 aa, Artificial Sequence
  Cyclic GFR-binding peptide
EPISVLYLDDMGVPTKFKYEEIVRKKPIF

SEQ ID NO: 100168 - protein, 29 aa, Artificial Sequence
  Cyclic GFR-binding peptide
SPISILYIVGRKPKVYKQYEEIVRKKPIF

SEQ ID NO: 100169 - protein, 29 aa, Artificial Sequence
  Cyclic GFR-binding peptide
SPISMLYIDEYDKVVYKQYEEIVRKKPIF

SEQ ID NO: 100170 - protein, 29 aa, Artificial Sequence
  Cyclic GFR-binding peptide
EPISILYLIGKTPKIKFKYEEIVRKKPIF

SEQ ID NO: 100171 - protein, 29 aa, Artificial Sequence
  Cyclic GFR-binding peptide
SPISILYKDKGVVTYLKYHYEIVRKKPIF

SEQ ID NO: 100172 - protein, 29 aa, Artificial Sequence
  Cyclic GFR-binding peptide
NAISILYFDKGVVTYLKKYREIVRKKPIF

SEQ ID NO: 100173 - protein, 29 aa, Artificial Sequence
  Cyclic GFR-binding peptide
SPISILYIDAANNVVYKQYEEIVRKKPIF

SEQ ID NO: 100174 - protein, 29 aa, Artificial Sequence
  Cyclic GFR-binding peptide
SPISILYIVGRTPKVYKQYEEIVRKKPIF

SEQ ID NO: 100175 - protein, 29 aa, Artificial Sequence
  Cyclic GFR-binding peptide
SPISVLYIDDMGVPTYKQYEEIVRKKPIF

SEQ ID NO: 100176 - protein, 29 aa, Artificial Sequence
  Cyclic GFR-binding peptide
EPISMLYLDEYDKVVKFKYEEIVRKKPIF

SEQ ID NO: 100177 - protein, 29 aa, Artificial Sequence
  Cyclic GFR-binding peptide
EPISILYLDAANNVVKFKYEEIVRKKPIF

SEQ ID NO: 100178 - protein, 29 aa, Artificial Sequence
  Cyclic GFR-binding peptide
SPISMLYIDENEKVVYKQYEEIVRKKPIF

SEQ ID NO: 100179 - protein, 29 aa, Artificial Sequence
  Cyclic GFR-binding peptide
SPISILYIIGKTPKIYKQYEEIVRKKPIF

SEQ ID NO: 100180 - protein, 29 aa, Artificial Sequence
  Cyclic GFR-binding peptide
NAISILYFDAANNVVLKKYREIVRKKPIF

SEQ ID NO: 100181 - protein, 29 aa, Artificial Sequence
  Cyclic GFR-binding peptide
SPISILYKDAANNVVLKYHYEIVRKKPIF

SEQ ID NO: 100182 - protein, 29 aa, Artificial Sequence
  Cyclic GFR-binding peptide
EPISVLYLDSSNNVIKFKYEEIVRKKPIF

SEQ ID NO: 100183 - protein, 29 aa, Artificial Sequence
  Cyclic GFR-binding peptide
SPISVLYIDDSSNVIYKQYEEIVRKKPIF

SEQ ID NO: 100184 - protein, 29 aa, Artificial Sequence
  Cyclic GFR-binding peptide
EPISVLYLDDSSNVIKFKYEEIVRKKPIF

SEQ ID NO: 100185 - protein, 29 aa, Artificial Sequence
  Cyclic GFR-binding peptide
EPISILYLVGRKPKVKFKYEEIVRKKPIF

SEQ ID NO: 100186 - protein, 29 aa, Artificial Sequence
  Cyclic GFR-binding peptide
SPISILYIDKGVVTYYKQYEEIVRKKPIF

SEQ ID NO: 100187 - protein, 29 aa, Artificial Sequence
  Cyclic GFR-binding peptide
EPISMLYLDENEKVVKFKYEEIVRKKPIF

SEQ ID NO: 100188 - protein, 29 aa, Artificial Sequence
  Cyclic GFR-binding peptide
SPISVLYIDSSNNVIYKQYEEIVRKKPIF

SEQ ID NO: 100189 - protein, 29 aa, Artificial Sequence
  Cyclic GFR-binding peptide
EPISILYLDKGVVTYKFKYEEIVRKKPIF

SEQ ID NO: 100190 - protein, 29 aa, Artificial Sequence
  Cyclic GFR-binding peptide
EIVRKKPIFPIKGYIIQQKDNFYLMNIPS

SEQ ID NO: 100191 - protein, 29 aa, Artificial Sequence
  Cyclic GFR-binding peptide
EIVRKKPIFPIKGYVVKDYEDFYLMNIPS

SEQ ID NO: 100192 - protein, 29 aa, Artificial Sequence
  Cyclic GFR-binding peptide
EIVRKKPIFPIKGYIVNSSDDFYLVNIPS

SEQ ID NO: 100193 - protein, 29 aa, Artificial Sequence
  Cyclic GFR-binding peptide
EIVRKKPIFPIKGYVVNNAADFYLINIPS

SEQ ID NO: 100194 - protein, 29 aa, Artificial Sequence
  Cyclic GFR-binding peptide
EIVRKKPIFPIKGYYTVVGKDFYLINIPS

SEQ ID NO: 100195 - protein, 29 aa, Artificial Sequence
  Cyclic GFR-binding peptide
EIVRKKPIFPIKGYLLVRGNDFYLMNIPS

SEQ ID NO: 100196 - protein, 29 aa, Artificial Sequence
  Cyclic GFR-binding peptide
EIVRKKPIFPIKGYVVKENEDFYLMNIPS

SEQ ID NO: 100197 - protein, 29 aa, Artificial Sequence
  Cyclic GFR-binding peptide
EIVRKKPIFPIKGYVVNNASDFYLINIPS

SEQ ID NO: 100198 - protein, 29 aa, Artificial Sequence
  Cyclic GFR-binding peptide
EIVRKKPIFPIKGYTPVGMDDFYLVNIPS

SEQ ID NO: 100199 - protein, 29 aa, Artificial Sequence
  Cyclic GFR-binding peptide
EIVRKKPIFPIKGYIVNNSSDFYLVNIPS

SEQ ID NO: 100200 - protein, 29 aa, Artificial Sequence
  Cyclic GFR-binding peptide
SPINMLYFNDKQQIIYGKIPEIVRKKPIF

SEQ ID NO: 100201 - protein, 29 aa, Artificial Sequence
  Cyclic GFR-binding peptide
SPINMLYFDEYDKVVYGKIPEIVRKKPIF

SEQ ID NO: 100202 - protein, 29 aa, Artificial Sequence
  Cyclic GFR-binding peptide
SPINVLYFDDSSNVIYGKIPEIVRKKPIF

SEQ ID NO: 100203 - protein, 29 aa, Artificial Sequence
  Cyclic GFR-binding peptide
SPINILYFDAANNVVYGKIPEIVRKKPIF

SEQ ID NO: 100204 - protein, 29 aa, Artificial Sequence
  Cyclic GFR-binding peptide
SPINILYFDKGVVTYYGKIPEIVRKKPIF

SEQ ID NO: 100205 - protein, 29 aa, Artificial Sequence
  Cyclic GFR-binding peptide
SPINMLYFDNGRVLLYGKIPEIVRKKPIF

SEQ ID NO: 100206 - protein, 29 aa, Artificial Sequence
  Cyclic GFR-binding peptide
SPINMLYFDENEKVVYGKIPEIVRKKPIF

SEQ ID NO: 100207 - protein, 29 aa, Artificial Sequence
  Cyclic GFR-binding peptide
SPINILYFDSANNVVYGKIPEIVRKKPIF

SEQ ID NO: 100208 - protein, 29 aa, Artificial Sequence
  Cyclic GFR-binding peptide
SPINVLYFDDMGVPTYGKIPEIVRKKPIF

SEQ ID NO: 100209 - protein, 29 aa, Artificial Sequence
  Cyclic GFR-binding peptide
SPINVLYFDSSNNVIYGKIPEIVRKKPIF

SEQ ID NO: 100210 - protein, 29 aa, Artificial Sequence
  Cyclic GFR-binding peptide
EIVRKKPIFEYQKYVVNNASDIYLISIPS

SEQ ID NO: 100211 - protein, 29 aa, Artificial Sequence
  Cyclic GFR-binding peptide
EIVRKKPIFEYQKYIIQQKDNIYLMSIPS

SEQ ID NO: 100212 - protein, 29 aa, Artificial Sequence
  Cyclic GFR-binding peptide
EIVRKKPIFEYQKYLLVRGNDIYLMSIPS

SEQ ID NO: 100213 - protein, 29 aa, Artificial Sequence
  Cyclic GFR-binding peptide
SPISILYIDSANNVVYKQYEEIVRKKPIF

SEQ ID NO: 100214 - protein, 29 aa, Artificial Sequence
  Cyclic GFR-binding peptide
SPISMLYINDKQQIIYKQYEEIVRKKPIF

SEQ ID NO: 100215 - protein, 29 aa, Artificial Sequence
  Cyclic GFR-binding peptide
SPISMLYIDNGRVLLYKQYEEIVRKKPIF

SEQ ID NO: 100216 - protein, 29 aa, Artificial Sequence
  Cyclic GFR-binding peptide
EIVRKKPIFPYVKLYTVVGKDFFLISLSS

SEQ ID NO: 100217 - protein, 29 aa, Artificial Sequence
  Cyclic GFR-binding peptide
EIVRKKPIFPYVKLIKPTKGIFFLISLSS

SEQ ID NO: 100218 - protein, 29 aa, Artificial Sequence
  Cyclic GFR-binding peptide
EIVRKKPIFPYVKLIIQQKDNFFLMSLSS

SEQ ID NO: 100219 - protein, 29 aa, Artificial Sequence
  Cyclic GFR-binding peptide
EIVRKKPIFPYVKLIVNSSDDFFLVSLSS

SEQ ID NO: 100220 - protein, 29 aa, Artificial Sequence
  Cyclic GFR-binding peptide
EIVRKKPIFPYVKLVKPKRGVFFLISLSS

SEQ ID NO: 100221 - protein, 29 aa, Artificial Sequence
  Cyclic GFR-binding peptide
EIVRKKPIFPYVKLVKPTRGVFFLISLSS

SEQ ID NO: 100222 - protein, 29 aa, Artificial Sequence
  Cyclic GFR-binding peptide
EIVRKKPIFPYVKLTPVGMDDFFLVSLSS

SEQ ID NO: 100223 - protein, 31 aa, Artificial Sequence
  Cyclic GFR-binding peptide
EIVRKKPIFPYVKLHQGQHPKIRFFLMSLSS

SEQ ID NO: 100224 - protein, 29 aa, Artificial Sequence
  Cyclic GFR-binding peptide
EIVRKKPIFPYVKLVVNKNEDFFLISLSS

SEQ ID NO: 100225 - protein, 29 aa, Artificial Sequence
  Cyclic GFR-binding peptide
EIVRKKPIFPYVKLVVNNASDFFLISLSS

SEQ ID NO: 100226 - protein, 29 aa, Artificial Sequence
  Cyclic GFR-binding peptide
EIVRKKPIFPYVKLVVKENEDFFLMSLSS

SEQ ID NO: 100227 - protein, 29 aa, Artificial Sequence
  Cyclic GFR-binding peptide
EIVRKKPIFPYVKLIVNNSSDFFLVSLSS

SEQ ID NO: 100228 - protein, 31 aa, Artificial Sequence
  Cyclic GFR-binding peptide
EIVRKKPIFPYVKLLKPKKRVYEFFLVSLSS

SEQ ID NO: 100229 - protein, 29 aa, Artificial Sequence
  Cyclic GFR-binding peptide
EIVRKKPIFPYVKLLLVRGNDFFLMSLSS

SEQ ID NO: 100230 - protein, 29 aa, Artificial Sequence
  Cyclic GFR-binding peptide
EIVRKKPIFPYVKLVVKDYEDFFLMSLSS

SEQ ID NO: 100231 - protein, 29 aa, Artificial Sequence
  Cyclic GFR-binding peptide
EIVRKKPIFPYVKLVVNNAADFFLISLSS

SEQ ID NO: 100232 - protein, 29 aa, Artificial Sequence
  Cyclic GFR-binding peptide
SSLSILFFDKGVVTYLKVYPEIVRKKPIF

SEQ ID NO: 100233 - protein, 29 aa, Artificial Sequence
  Cyclic GFR-binding peptide
SSLSILFFIGKTPKILKVYPEIVRKKPIF

SEQ ID NO: 100234 - protein, 29 aa, Artificial Sequence
  Cyclic GFR-binding peptide
SSLSMLFFNDKQQIILKVYPEIVRKKPIF

SEQ ID NO: 100235 - protein, 29 aa, Artificial Sequence
  Cyclic GFR-binding peptide
SSLSVLFFDDSSNVILKVYPEIVRKKPIF

SEQ ID NO: 100236 - protein, 29 aa, Artificial Sequence
  Cyclic GFR-binding peptide
SSLSILFFVGRKPKVLKVYPEIVRKKPIF

SEQ ID NO: 100237 - protein, 29 aa, Artificial Sequence
  Cyclic GFR-binding peptide
SSLSILFFVGRTPKVLKVYPEIVRKKPIF

SEQ ID NO: 100238 - protein, 29 aa, Artificial Sequence
  Cyclic GFR-binding peptide
SSLSVLFFDDMGVPTLKVYPEIVRKKPIF

SEQ ID NO: 100239 - protein, 31 aa, Artificial Sequence
  Cyclic GFR-binding peptide
SSLSMLFFRIKPHQGQHLKVYPEIVRKKPIF

SEQ ID NO: 100240 - protein, 29 aa, Artificial Sequence
  Cyclic GFR-binding peptide
SSLSILFFDENKNVVLKVYPEIVRKKPIF

SEQ ID NO: 100241 - protein, 29 aa, Artificial Sequence
  Cyclic GFR-binding peptide
SSLSILFFDSANNVVLKVYPEIVRKKPIF

SEQ ID NO: 100242 - protein, 29 aa, Artificial Sequence
  Cyclic GFR-binding peptide
SSLSMLFFDENEKVVLKVYPEIVRKKPIF

SEQ ID NO: 100243 - protein, 29 aa, Artificial Sequence
  Cyclic GFR-binding peptide
SSLSVLFFDSSNNVILKVYPEIVRKKPIF

SEQ ID NO: 100244 - protein, 31 aa, Artificial Sequence
  Cyclic GFR-binding peptide
SSLSVLFFEYVRKKPKLLKVYPEIVRKKPIF

SEQ ID NO: 100245 - protein, 29 aa, Artificial Sequence
  Cyclic GFR-binding peptide
SSLSMLFFDNGRVLLLKVYPEIVRKKPIF

SEQ ID NO: 100246 - protein, 29 aa, Artificial Sequence
  Cyclic GFR-binding peptide
SSLSMLFFDEYDKVVLKVYPEIVRKKPIF

SEQ ID NO: 100247 - protein, 29 aa, Artificial Sequence
  Cyclic GFR-binding peptide
SSLSILFFDAANNVVLKVYPEIVRKKPIF

SEQ ID NO: 100248 - protein, 29 aa, Artificial Sequence
  Cyclic GFR-binding peptide
EIVRKKPIFSMEGIIVNSSDDMIQVTINS

SEQ ID NO: 100249 - protein, 29 aa, Artificial Sequence
  Cyclic GFR-binding peptide
EIVRKKPIFVTAKKVVKENEDIKRMQVPR

SEQ ID NO: 100250 - protein, 29 aa, Artificial Sequence
  Cyclic GFR-binding peptide
EIVRKKPIFSMEGIVVKDYEDMIQMTINS

SEQ ID NO: 100251 - protein, 29 aa, Artificial Sequence
  Cyclic GFR-binding peptide
EIVRKKPIFVTAKKIKPTKGIIKRIQVPR

SEQ ID NO: 100252 - protein, 29 aa, Artificial Sequence
  Cyclic GFR-binding peptide
EIVRKKPIFSMEGIVKPTRGVMIQITINS

SEQ ID NO: 100253 - protein, 31 aa, Artificial Sequence
  Cyclic GFR-binding peptide
EIVRKKPIFNSLQEFIPKKRVIEYYVVPLPE

SEQ ID NO: 100254 - protein, 29 aa, Artificial Sequence
  Cyclic GFR-binding peptide
EIVRKKPIFVQVEKVKPKRGVVKAIKVSR

SEQ ID NO: 100255 - protein, 29 aa, Artificial Sequence
  Cyclic GFR-binding peptide
EIVRKKPIFVQVEKVVKENEDVKAMKVSR

SEQ ID NO: 100256 - protein, 29 aa, Artificial Sequence
  Cyclic GFR-binding peptide
EIVRKKPIFVTAKKIVNSSDDIKRVQVPR

SEQ ID NO: 100257 - protein, 29 aa, Artificial Sequence
  Cyclic GFR-binding peptide
EIVRKKPIFVQVEKIKPTKGIVKAIKVSR

SEQ ID NO: 100258 - protein, 31 aa, Artificial Sequence
  Cyclic GFR-binding peptide
EIVRKKPIFNSLQEFIPKKRVIEYYLVTLPE

SEQ ID NO: 100259 - protein, 29 aa, Artificial Sequence
  Cyclic GFR-binding peptide
EIVRKKPIFVQVEKIVNSSDDVKAVKVSR

SEQ ID NO: 100260 - protein, 29 aa, Artificial Sequence
  Cyclic GFR-binding peptide
EIVRKKPIFVTAKKVKPKRGVIKRIQVPR

SEQ ID NO: 100261 - protein, 29 aa, Artificial Sequence
  Cyclic GFR-binding peptide
EIVRKKPIFVQVEKVKPTRGVVKAIKVSR

SEQ ID NO: 100262 - protein, 29 aa, Artificial Sequence
  Cyclic GFR-binding peptide
EIVRKKPIFVTAKKVKPTRGVIKRIQVPR

SEQ ID NO: 100263 - protein, 31 aa, Artificial Sequence
  Cyclic GFR-binding peptide
EIVRKKPIFNSLQELKPKKRVYEYYLVTLPE

SEQ ID NO: 100264 - protein, 29 aa, Artificial Sequence
  Cyclic GFR-binding peptide
EIVRKKPIFSMEGIVKPKRGVMIQITINS

SEQ ID NO: 100265 - protein, 29 aa, Artificial Sequence
  Cyclic GFR-binding peptide
EIVRKKPIFSMEGIVVKENEDMIQMTINS

SEQ ID NO: 100266 - protein, 29 aa, Artificial Sequence
  Cyclic GFR-binding peptide
EIVRKKPIFSMEGIIKPTKGIMIQITINS

SEQ ID NO: 100267 - protein, 31 aa, Artificial Sequence
  Cyclic GFR-binding peptide
EIVRKKPIFNSLQEHQGQHPKIRYYLMTLPE

SEQ ID NO: 100268 - protein, 29 aa, Artificial Sequence
  Cyclic GFR-binding peptide
EIVRKKPIFVTAKKVVKDYEDIKRMQVPR

SEQ ID NO: 100269 - protein, 31 aa, Artificial Sequence
  Cyclic GFR-binding peptide
EIVRKKPIFNSLQEHQGQHPKIRYYVMPLPE

SEQ ID NO: 100270 - protein, 31 aa, Artificial Sequence
  Cyclic GFR-binding peptide
EIVRKKPIFNSLQELKPKKRVYEYYVVPLPE

SEQ ID NO: 100271 - protein, 29 aa, Artificial Sequence
  Cyclic GFR-binding peptide
EIVRKKPIFVQVEKVVKDYEDVKAMKVSR

SEQ ID NO: 100272 - protein, 29 aa, Artificial Sequence
  Cyclic GFR-binding peptide
SNITVQIMDDSSNVIIGEMSEIVRKKPIF

SEQ ID NO: 100273 - protein, 29 aa, Artificial Sequence
  Cyclic GFR-binding peptide
RPVQMRKIDENEKVVKKATVEIVRKKPIF

SEQ ID NO: 100274 - protein, 29 aa, Artificial Sequence
  Cyclic GFR-binding peptide
SNITMQIMDEYDKVVIGEMSEIVRKKPIF

SEQ ID NO: 100275 - protein, 29 aa, Artificial Sequence
  Cyclic GFR-binding peptide
RPVQIRKIIGKTPKIKKATVEIVRKKPIF

SEQ ID NO: 100276 - protein, 29 aa, Artificial Sequence
  Cyclic GFR-binding peptide
SNITIQIMVGRTPKVIGEMSEIVRKKPIF

SEQ ID NO: 100277 - protein, 31 aa, Artificial Sequence
  Cyclic GFR-binding peptide
EPLPVVYYEIVRKKPIFEQLSNEIVRKKPIF

SEQ ID NO: 100278 - protein, 29 aa, Artificial Sequence
  Cyclic GFR-binding peptide
RSVKIAKVVGRKPKVKEVQVEIVRKKPIF

SEQ ID NO: 100279 - protein, 29 aa, Artificial Sequence
  Cyclic GFR-binding peptide
RSVKMAKVDENEKVVKEVQVEIVRKKPIF

SEQ ID NO: 100280 - protein, 29 aa, Artificial Sequence
  Cyclic GFR-binding peptide
RPVQVRKIDDSSNVIKKATVEIVRKKPIF

SEQ ID NO: 100281 - protein, 29 aa, Artificial Sequence
  Cyclic GFR-binding peptide
RSVKIAKVIGKTPKIKEVQVEIVRKKPIF

SEQ ID NO: 100282 - protein, 31 aa, Artificial Sequence
  Cyclic GFR-binding peptide
EPLTVLYYEIVRKKPIFEQLSNEIVRKKPIF

SEQ ID NO: 100283 - protein, 29 aa, Artificial Sequence
  Cyclic GFR-binding peptide
RSVKVAKVDDSSNVIKEVQVEIVRKKPIF

SEQ ID NO: 100284 - protein, 29 aa, Artificial Sequence
  Cyclic GFR-binding peptide
RPVQIRKIVGRKPKVKKATVEIVRKKPIF

SEQ ID NO: 100285 - protein, 29 aa, Artificial Sequence
  Cyclic GFR-binding peptide
RSVKIAKVVGRTPKVKEVQVEIVRKKPIF

SEQ ID NO: 100286 - protein, 29 aa, Artificial Sequence
  Cyclic GFR-binding peptide
RPVQIRKIVGRTPKVKKATVEIVRKKPIF

SEQ ID NO: 100287 - protein, 31 aa, Artificial Sequence
  Cyclic GFR-binding peptide
EPLTVLYYEYVRKKPKLEQLSNEIVRKKPIF

SEQ ID NO: 100288 - protein, 29 aa, Artificial Sequence
  Cyclic GFR-binding peptide
SNITIQIMVGRKPKVIGEMSEIVRKKPIF

SEQ ID NO: 100289 - protein, 29 aa, Artificial Sequence
  Cyclic GFR-binding peptide
SNITMQIMDENEKVVIGEMSEIVRKKPIF

SEQ ID NO: 100290 - protein, 29 aa, Artificial Sequence
  Cyclic GFR-binding peptide
SNITIQIMIGKTPKIIGEMSEIVRKKPIF

SEQ ID NO: 100291 - protein, 31 aa, Artificial Sequence
  Cyclic GFR-binding peptide
EPLTMLYYRIKPHQGQHEQLSNEIVRKKPIF

SEQ ID NO: 100292 - protein, 29 aa, Artificial Sequence
  Cyclic GFR-binding peptide
RPVQMRKIDEYDKVVKKATVEIVRKKPIF

SEQ ID NO: 100293 - protein, 31 aa, Artificial Sequence
  Cyclic GFR-binding peptide
EPLPMVYYRIKPHQGQHEQLSNEIVRKKPIF

SEQ ID NO: 100294 - protein, 31 aa, Artificial Sequence
  Cyclic GFR-binding peptide
EPLPVVYYEYVRKKPKLEQLSNEIVRKKPIF

SEQ ID NO: 100295 - protein, 29 aa, Artificial Sequence
  Cyclic GFR-binding peptide
RSVKMAKVDEYDKVVKEVQVEIVRKKPIF

SEQ ID NO: 100296 - protein, 29 aa, Artificial Sequence
  Cyclic GFR-binding peptide
EIVRKKPIFRYKKLIIQQKDNFYLMSIAN

SEQ ID NO: 100297 - protein, 29 aa, Artificial Sequence
  Cyclic GFR-binding peptide
EIVRKKPIFRYKKLLLVRGNDFYLMSIAN

SEQ ID NO: 100298 - protein, 29 aa, Artificial Sequence
  Cyclic GFR-binding peptide
NAISMLYFNDKQQIILKKYREIVRKKPIF

SEQ ID NO: 100299 - protein, 29 aa, Artificial Sequence
  Cyclic GFR-binding peptide
NAISMLYFDNGRVLLLKKYREIVRKKPIF

SEQ ID NO: 100300 - protein, 29 aa, Artificial Sequence
  Cyclic GFR-binding peptide
EIVRKKPIFEYKFKVVNKNEDLYLISIPE

SEQ ID NO: 100301 - protein, 29 aa, Artificial Sequence
  Cyclic GFR-binding peptide
EIVRKKPIFPIKGYVKPTRGVFYLINIPS

SEQ ID NO: 100302 - protein, 29 aa, Artificial Sequence
  Cyclic GFR-binding peptide
EIVRKKPIFEYKFKLLVRGNDLYLMSIPE

SEQ ID NO: 100303 - protein, 29 aa, Artificial Sequence
  Cyclic GFR-binding peptide
EIVRKKPIFYHYKLVVNKNEDKYLISIPS

SEQ ID NO: 100304 - protein, 29 aa, Artificial Sequence
  Cyclic GFR-binding peptide
EIVRKKPIFRHKRLLLVRGNDYYLMSTAS

SEQ ID NO: 100305 - protein, 29 aa, Artificial Sequence
  Cyclic GFR-binding peptide
EIVRKKPIFYHYKLLLVRGNDKYLMSIPS

SEQ ID NO: 100306 - protein, 29 aa, Artificial Sequence
  Cyclic GFR-binding peptide
EIVRKKPIFRHKRLVVNKNEDYYLISTAS

SEQ ID NO: 100307 - protein, 29 aa, Artificial Sequence
  Cyclic GFR-binding peptide
EIVRKKPIFRYKKLVVNKNEDFYLISIAN

SEQ ID NO: 100308 - protein, 29 aa, Artificial Sequence
  Cyclic GFR-binding peptide
EIVRKKPIFPIKGYVVNKNEDFYLINIPS

SEQ ID NO: 100309 - protein, 29 aa, Artificial Sequence
  Cyclic GFR-binding peptide
EIVRKKPIFPIKGYIKPTKGIFYLINIPS

SEQ ID NO: 100310 - protein, 29 aa, Artificial Sequence
  Cyclic GFR-binding peptide
EIVRKKPIFRHKRLYTVVGKDYYLISTAS

SEQ ID NO: 100311 - protein, 29 aa, Artificial Sequence
  Cyclic GFR-binding peptide
EIVRKKPIFEYKFKVVNNASDLYLISIPE

SEQ ID NO: 100312 - protein, 29 aa, Artificial Sequence
  Cyclic GFR-binding peptide
EIVRKKPIFRHKRLIIQQKDNYYLMSTAS

SEQ ID NO: 100313 - protein, 29 aa, Artificial Sequence
  Cyclic GFR-binding peptide
EIVRKKPIFEYKFKIIQQKDNLYLMSIPE

SEQ ID NO: 100314 - protein, 29 aa, Artificial Sequence
  Cyclic GFR-binding peptide
EIVRKKPIFPIKGYVKPKRGVFYLINIPS

SEQ ID NO: 100315 - protein, 29 aa, Artificial Sequence
  Cyclic GFR-binding peptide
EIVRKKPIFRHKRLVVNNASDYYLISTAS

SEQ ID NO: 100316 - protein, 29 aa, Artificial Sequence
  Cyclic GFR-binding peptide
EIVRKKPIFYHYKLVVNNASDKYLISIPS

SEQ ID NO: 100317 - protein, 29 aa, Artificial Sequence
  Cyclic GFR-binding peptide
EIVRKKPIFYHYKLIIQQKDNKYLMSIPS

SEQ ID NO: 100318 - protein, 29 aa, Artificial Sequence
  Cyclic GFR-binding peptide
EIVRKKPIFRHKRLVVNNAADYYLISTAS

SEQ ID NO: 100319 - protein, 29 aa, Artificial Sequence
  Cyclic GFR-binding peptide
EPISILYLDENKNVVKFKYEEIVRKKPIF

SEQ ID NO: 100320 - protein, 29 aa, Artificial Sequence
  Cyclic GFR-binding peptide
SPINILYFVGRTPKVYGKIPEIVRKKPIF

SEQ ID NO: 100321 - protein, 29 aa, Artificial Sequence
  Cyclic GFR-binding peptide
EPISMLYLDNGRVLLKFKYEEIVRKKPIF

SEQ ID NO: 100322 - protein, 29 aa, Artificial Sequence
  Cyclic GFR-binding peptide
SPISILYKDENKNVVLKYHYEIVRKKPIF

SEQ ID NO: 100323 - protein, 29 aa, Artificial Sequence
  Cyclic GFR-binding peptide
SATSMLYYDNGRVLLLRKHREIVRKKPIF

SEQ ID NO: 100324 - protein, 29 aa, Artificial Sequence
  Cyclic GFR-binding peptide
SPISMLYKDNGRVLLLKYHYEIVRKKPIF

SEQ ID NO: 100325 - protein, 29 aa, Artificial Sequence
  Cyclic GFR-binding peptide
SATSILYYDENKNVVLRKHREIVRKKPIF

SEQ ID NO: 100326 - protein, 29 aa, Artificial Sequence
  Cyclic GFR-binding peptide
NAISILYFDENKNVVLKKYREIVRKKPIF

SEQ ID NO: 100327 - protein, 29 aa, Artificial Sequence
  Cyclic GFR-binding peptide
SPINILYFDENKNVVYGKIPEIVRKKPIF

SEQ ID NO: 100328 - protein, 29 aa, Artificial Sequence
  Cyclic GFR-binding peptide
SPINILYFIGKTPKIYGKIPEIVRKKPIF

SEQ ID NO: 100329 - protein, 29 aa, Artificial Sequence
  Cyclic GFR-binding peptide
SATSILYYDKGVVTYLRKHREIVRKKPIF

SEQ ID NO: 100330 - protein, 29 aa, Artificial Sequence
  Cyclic GFR-binding peptide
EPISILYLDSANNVVKFKYEEIVRKKPIF

SEQ ID NO: 100331 - protein, 29 aa, Artificial Sequence
  Cyclic GFR-binding peptide
SATSMLYYNDKQQIILRKHREIVRKKPIF

SEQ ID NO: 100332 - protein, 29 aa, Artificial Sequence
  Cyclic GFR-binding peptide
EPISMLYLNDKQQIIKFKYEEIVRKKPIF

SEQ ID NO: 100333 - protein, 29 aa, Artificial Sequence
  Cyclic GFR-binding peptide
SPINILYFVGRKPKVYGKIPEIVRKKPIF

SEQ ID NO: 100334 - protein, 29 aa, Artificial Sequence
  Cyclic GFR-binding peptide
SATSILYYDSANNVVLRKHREIVRKKPIF

SEQ ID NO: 100335 - protein, 29 aa, Artificial Sequence
  Cyclic GFR-binding peptide
SPISILYKDSANNVVLKYHYEIVRKKPIF

SEQ ID NO: 100336 - protein, 29 aa, Artificial Sequence
  Cyclic GFR-binding peptide
SPISMLYKNDKQQIILKYHYEIVRKKPIF

SEQ ID NO: 100337 - protein, 29 aa, Artificial Sequence
  Cyclic GFR-binding peptide
SATSILYYDAANNVVLRKHREIVRKKPIF

SEQ ID NO: 100338 - protein, 29 aa, Artificial Sequence
  Cyclic GFR-binding peptide
EIVRKKPIFSMEGIIIQQKDNMIQMTINS

SEQ ID NO: 100339 - protein, 29 aa, Artificial Sequence
  Cyclic GFR-binding peptide
EIVRKKPIFSMEGLVKPKRGVMIQITINS

SEQ ID NO: 100340 - protein, 29 aa, Artificial Sequence
  Cyclic GFR-binding peptide
EIVRKKPIFSMEGLVVNNASDMIQITINS

SEQ ID NO: 100341 - protein, 29 aa, Artificial Sequence
  Cyclic GFR-binding peptide
EIVRKKPIFSMEGILLVRGNDMIQMTINS

SEQ ID NO: 100342 - protein, 29 aa, Artificial Sequence
  Cyclic GFR-binding peptide
EIVRKKPIFSMEGLIKPTKGIMIQITINS

SEQ ID NO: 100343 - protein, 29 aa, Artificial Sequence
  Cyclic GFR-binding peptide
EIVRKKPIFSMEGLIVNSSDDMIQVTINS

SEQ ID NO: 100344 - protein, 29 aa, Artificial Sequence
  Cyclic GFR-binding peptide
EIVRKKPIFSMEGIVVNNASDMIQITINS

SEQ ID NO: 100345 - protein, 29 aa, Artificial Sequence
  Cyclic GFR-binding peptide
EIVRKKPIFSMEGLVVNNAADMIQITINS

SEQ ID NO: 100346 - protein, 29 aa, Artificial Sequence
  Cyclic GFR-binding peptide
EIVRKKPIFSMEGLLLVRGNDMIQMTINS

SEQ ID NO: 100347 - protein, 29 aa, Artificial Sequence
  Cyclic GFR-binding peptide
EIVRKKPIFSMEGLIIQQKDNMIQMTINS

SEQ ID NO: 100348 - protein, 29 aa, Artificial Sequence
  Cyclic GFR-binding peptide
EIVRKKPIFSMEGIVVNNAADMIQITINS

SEQ ID NO: 100349 - protein, 29 aa, Artificial Sequence
  Cyclic GFR-binding peptide
EIVRKKPIFSMEGLVKPTRGVMIQITINS

SEQ ID NO: 100350 - protein, 29 aa, Artificial Sequence
  Cyclic GFR-binding peptide
SNITMQIMNDKQQIIIGEMSEIVRKKPIF

SEQ ID NO: 100351 - protein, 29 aa, Artificial Sequence
  Cyclic GFR-binding peptide
SNITIQIMVGRKPKVLGEMSEIVRKKPIF

SEQ ID NO: 100352 - protein, 29 aa, Artificial Sequence
  Cyclic GFR-binding peptide
SNITIQIMDSANNVVLGEMSEIVRKKPIF

SEQ ID NO: 100353 - protein, 29 aa, Artificial Sequence
  Cyclic GFR-binding peptide
SNITMQIMDNGRVLLIGEMSEIVRKKPIF

SEQ ID NO: 100354 - protein, 29 aa, Artificial Sequence
  Cyclic GFR-binding peptide
SNITIQIMIGKTPKILGEMSEIVRKKPIF

SEQ ID NO: 100355 - protein, 29 aa, Artificial Sequence
  Cyclic GFR-binding peptide
SNITVQIMDDSSNVILGEMSEIVRKKPIF

SEQ ID NO: 100356 - protein, 29 aa, Artificial Sequence
  Cyclic GFR-binding peptide
SNITIQIMDSANNVVIGEMSEIVRKKPIF

SEQ ID NO: 100357 - protein, 29 aa, Artificial Sequence
  Cyclic GFR-binding peptide
SNITIQIMDAANNVVLGEMSEIVRKKPIF

SEQ ID NO: 100358 - protein, 29 aa, Artificial Sequence
  Cyclic GFR-binding peptide
SNITMQIMDNGRVLLLGEMSEIVRKKPIF

SEQ ID NO: 100359 - protein, 29 aa, Artificial Sequence
  Cyclic GFR-binding peptide
SNITMQIMNDKQQIILGEMSEIVRKKPIF

SEQ ID NO: 100360 - protein, 29 aa, Artificial Sequence
  Cyclic GFR-binding peptide
SNITIQIMDAANNVVIGEMSEIVRKKPIF

SEQ ID NO: 100361 - protein, 29 aa, Artificial Sequence
  Cyclic GFR-binding peptide
SNITIQIMVGRTPKVLGEMSEIVRKKPIF

SEQ ID NO: 100362 - protein, 29 aa, Artificial Sequence
  Cyclic GFR-binding peptide
EIVRKKPIFQYNKLVVNKNEDLYLISIAS

SEQ ID NO: 100363 - protein, 29 aa, Artificial Sequence
  Cyclic GFR-binding peptide
EIVRKKPIFQYNKLVVNNAADLYLISIAS

SEQ ID NO: 100364 - protein, 29 aa, Artificial Sequence
  Cyclic GFR-binding peptide
EIVRKKPIFQYNKLIIQQKDNLYLMSIAS

SEQ ID NO: 100365 - protein, 29 aa, Artificial Sequence
  Cyclic GFR-binding peptide
EIVRKKPIFQYNKLLLVRGNDLYLMSIAS

SEQ ID NO: 100366 - protein, 29 aa, Artificial Sequence
  Cyclic GFR-binding peptide
EIVRKKPIFQYNKLYTVVGKDLYLISIAS

SEQ ID NO: 100367 - protein, 29 aa, Artificial Sequence
  Cyclic GFR-binding peptide
SAISILYLDENKNVVLKNYQEIVRKKPIF

SEQ ID NO: 100368 - protein, 29 aa, Artificial Sequence
  Cyclic GFR-binding peptide
SAISILYLDAANNVVLKNYQEIVRKKPIF

SEQ ID NO: 100369 - protein, 29 aa, Artificial Sequence
  Cyclic GFR-binding peptide
SAISMLYLNDKQQIILKNYQEIVRKKPIF

SEQ ID NO: 100370 - protein, 29 aa, Artificial Sequence
  Cyclic GFR-binding peptide
SAISMLYLDNGRVLLLKNYQEIVRKKPIF

SEQ ID NO: 100371 - protein, 29 aa, Artificial Sequence
  Cyclic GFR-binding peptide
SAISILYLDKGVVTYLKNYQEIVRKKPIF

SEQ ID NO: 100372 - protein, 7 aa, Artificial Sequence
  Building block peptide "PEP"
  MOD_RES (6)..(7): Xaa is C or S
KIPKAXX

SEQ ID NO: 100373 - protein, 7 aa, Artificial Sequence
  Building block peptide "PEP"
  MOD_RES (6)..(7): Xaa is C or S
GIPEPXX

SEQ ID NO: 100374 - protein, 7 aa, Artificial Sequence
  Building block peptide "PEP"
  MOD_RES (6)..(7): Xaa is C or S
SIPKAXX

SEQ ID NO: 100375 - protein, 7 aa, Artificial Sequence
  Building block peptide "PEP"
  MOD_RES (7)..(7): Xaa is C or S
HVTKPTX

SEQ ID NO: 100376 - protein, 7 aa, Artificial Sequence
  Building block peptide "PEP"
  MOD_RES (6)..(7): Xaa is C or S
YVPKPXX

SEQ ID NO: 100377 - protein, 7 aa, Artificial Sequence
  Building block peptide "PEP"
  MOD_RES (6)..(7): Xaa is C or S
TVPKPXX

SEQ ID NO: 100378 - protein, 7 aa, Artificial Sequence
  Building block peptide "PEP"
  MOD_RES (6)..(7): Xaa is C or S
AVPKAXX

SEQ ID NO: 100379 - protein, 7 aa, Artificial Sequence
  Building block peptide "PEP"
  MOD_RES (6)..(7): Xaa is C or S
KVGKAXX

SEQ ID NO: 100380 - protein, 7 aa, Artificial Sequence
  Building block peptide "PEP"
  MOD_RES (6)..(7): Xaa is C or S
KASKAXX

SEQ ID NO: 100381 - protein, 7 aa, Artificial Sequence
  Building block peptide "PEP"
  MOD_RES (6)..(7): Xaa is C or S
GSAGPXX

SEQ ID NO: 100382 - protein, 7 aa, Artificial Sequence
  Building block peptide "PEP"
  MOD_RES (6)..(7): Xaa is C or S
AAPASXX

SEQ ID NO: 100383 - protein, 7 aa, Artificial Sequence
  Building block peptide "PEP"
  MOD_RES (6)..(7): Xaa is C or S
STPPTXX

SEQ ID NO: 100384 - protein, 7 aa, Artificial Sequence
  Building block peptide "PEP"
  MOD_RES (6)..(7): Xaa is C or S
HVPKPXX

SEQ ID NO: 100385 - protein, 7 aa, Artificial Sequence
  Building block peptide "PEP"
  MOD_RES (6)..(7): Xaa is C or S
RVPSTXX

SEQ ID NO: 100386 - protein, 7 aa, Artificial Sequence
  Building block peptide "PEP"
  MOD_RES (6)..(7): Xaa is C or S
ASAAPXX

SEQ ID NO: 100387 - protein, 7 aa, Artificial Sequence
  Building block peptide "PEP"
  MOD_RES (6)..(7): Xaa is C or S
ASASPXX

SEQ ID NO: 100388 - protein, 7 aa, Artificial Sequence
  Building block peptide "PEP"
  MOD_RES (7)..(7): Xaa is C or S
NDEGLEX

SEQ ID NO: 100389 - protein, 7 aa, Artificial Sequence
  Building block peptide "PEP"
  MOD_RES (5)..(5): Xaa is C or S
SSVKXQP

SEQ ID NO: 100390 - protein, 7 aa, Artificial Sequence
  Building block peptide "PEP"
  MOD_RES (5)..(5): Xaa is C or S
RNVQXRP

SEQ ID NO: 100391 - protein, 4 aa, Artificial Sequence
  Building block peptide "PEP"
SAIS

SEQ ID NO: 100392 - protein, 4 aa, Artificial Sequence
  Building block peptide "PEP"
SSLS

SEQ ID NO: 100393 - protein, 4 aa, Artificial Sequence
  Building block peptide "PEP"
NAIS

SEQ ID NO: 100394 - protein, 4 aa, Artificial Sequence
  Building block peptide "PEP"
SATS

SEQ ID NO: 100395 - protein, 4 aa, Artificial Sequence
  Building block peptide "PEP"
SPIS

SEQ ID NO: 100396 - protein, 4 aa, Artificial Sequence
  Building block peptide "PEP"
EPIS

SEQ ID NO: 100397 - protein, 4 aa, Artificial Sequence
  Building block peptide "PEP"
SPIN

SEQ ID NO: 100398 - protein, 4 aa, Artificial Sequence
  Building block peptide "PEP"
KPLS

SEQ ID NO: 100399 - protein, 4 aa, Artificial Sequence
  Building block peptide "PEP"
EPLP

SEQ ID NO: 100400 - protein, 4 aa, Artificial Sequence
  Building block peptide "PEP"
EPLT

SEQ ID NO: 100401 - protein, 4 aa, Artificial Sequence
  Building block peptide "PEP"
SNIT

SEQ ID NO: 100402 - protein, 4 aa, Artificial Sequence
  Building block peptide "PEP"
RSVK

SEQ ID NO: 100403 - protein, 4 aa, Artificial Sequence
  Building block peptide "PEP"
RPVQ

SEQ ID NO: 100404 - protein, 7 aa, Artificial Sequence
  Building block peptide "PEP"
DENEKVV

SEQ ID NO: 100405 - protein, 7 aa, Artificial Sequence
  Building block peptide "PEP"
DENKNVV

SEQ ID NO: 100406 - protein, 7 aa, Artificial Sequence
  Building block peptide "PEP"
DEYDKVV

SEQ ID NO: 100407 - protein, 7 aa, Artificial Sequence
  Building block peptide "PEP"
DDSSNVI

SEQ ID NO: 100408 - protein, 7 aa, Artificial Sequence
  Building block peptide "PEP"
DSSNNVI

SEQ ID NO: 100409 - protein, 7 aa, Artificial Sequence
  Building block peptide "PEP"
DDMGVPT

SEQ ID NO: 100410 - protein, 7 aa, Artificial Sequence
  Building block peptide "PEP"
DKGVVTY

SEQ ID NO: 100411 - protein, 7 aa, Artificial Sequence
  Building block peptide "PEP"
NDKQQII

SEQ ID NO: 100412 - protein, 7 aa, Artificial Sequence
  Building block peptide "PEP"
DAANNVV

SEQ ID NO: 100413 - protein, 7 aa, Artificial Sequence
  Building block peptide "PEP"
DSANNVV

SEQ ID NO: 100414 - protein, 7 aa, Artificial Sequence
  Building block peptide "PEP"
DNGRVLL

SEQ ID NO: 100415 - protein, 7 aa, Artificial Sequence
  Building block peptide "PEP"
VGRKPKV

SEQ ID NO: 100416 - protein, 7 aa, Artificial Sequence
  Building block peptide "PEP"
IGKTPKI

SEQ ID NO: 100417 - protein, 7 aa, Artificial Sequence
  Building block peptide "PEP"
VGRTPKV

SEQ ID NO: 100418 - protein, 9 aa, Artificial Sequence
  Building block peptide "PEP"
RIKPHQGQH

SEQ ID NO: 100419 - protein, 9 aa, Artificial Sequence
  Building block peptide "PEP"
EYVRKKPKL

SEQ ID NO: 100420 - protein, 9 aa, Artificial Sequence
  Building block peptide "PEP"
EIVRKKPIF

SEQ ID NO: 100421 - protein, 5 aa, Artificial Sequence
  Building block peptide "PEP"
LKNYQ

SEQ ID NO: 100422 - protein, 5 aa, Artificial Sequence
  Building block peptide "PEP"
LKVYP

SEQ ID NO: 100423 - protein, 5 aa, Artificial Sequence
  Building block peptide "PEP"
LKKYR

SEQ ID NO: 100424 - protein, 5 aa, Artificial Sequence
  Building block peptide "PEP"
LRKHR

SEQ ID NO: 100425 - protein, 5 aa, Artificial Sequence
  Building block peptide "PEP"
LKYHY

SEQ ID NO: 100426 - protein, 5 aa, Artificial Sequence
  Building block peptide "PEP"
KFKYE

SEQ ID NO: 100427 - protein, 5 aa, Artificial Sequence
  Building block peptide "PEP"
YGKIP

SEQ ID NO: 100428 - protein, 5 aa, Artificial Sequence
  Building block peptide "PEP"
YKQYE

SEQ ID NO: 100429 - protein, 5 aa, Artificial Sequence
  Building block peptide "PEP"
DHHKD

SEQ ID NO: 100430 - protein, 5 aa, Artificial Sequence
  Building block peptide "PEP"
EQLSN

SEQ ID NO: 100431 - protein, 5 aa, Artificial Sequence
  Building block peptide "PEP"
IGEMS

SEQ ID NO: 100432 - protein, 5 aa, Artificial Sequence
  Building block peptide "PEP"
LGEMS

SEQ ID NO: 100433 - protein, 5 aa, Artificial Sequence
  Building block peptide "PEP"
KEVQV

SEQ ID NO: 100434 - protein, 5 aa, Artificial Sequence
  Building block peptide "PEP"
KKATV

SEQ ID NO: 100435 - protein, 5 aa, Artificial Sequence
  Building block peptide "PEP"
  MOD_RES (2)..(4): Xaa is C or S
GXGXR

SEQ ID NO: 100436 - protein, 5 aa, Artificial Sequence
  Building block peptide "PEP"
  MOD_RES (2)..(4): Xaa is C or S
SXAXR

SEQ ID NO: 100437 - protein, 5 aa, Artificial Sequence
  Building block peptide "PEP"
  MOD_RES (2)..(4): Xaa is C or S
SXGXH

SEQ ID NO: 100438 - protein, 5 aa, Artificial Sequence
  Building block peptide "PEP"
  MOD_RES (2)..(4): Xaa is C or S
AXGXH

SEQ ID NO: 100439 - protein, 4 aa, Artificial Sequence
  Building block peptide "PEP"
  MOD_RES (1)..(3): Xaa is C or S
XGXR

SEQ ID NO: 100440 - protein, 5 aa, Artificial Sequence
  Building block peptide "PEP"
  MOD_RES (2)..(4): Xaa is C or S
EXGXR

SEQ ID NO: 100441 - protein, 5 aa, Artificial Sequence
  Building block peptide "PEP"
  MOD_RES (2)..(4): Xaa is C or S
RXGXS

SEQ ID NO: 100442 - protein, 5 aa, Artificial Sequence
  Building block peptide "PEP"
  MOD_RES (2)..(4): Xaa is C or S
AXGXR

SEQ ID NO: 100443 - protein, 5 aa, Artificial Sequence
  Building block peptide "PEP"
  MOD_RES (2)..(4): Xaa is C or S
SXGXR

SEQ ID NO: 100444 - protein, 4 aa, Artificial Sequence
  Building block peptide "PEP"
  MOD_RES (1)..(3): Xaa is C or S
XGXL

SEQ ID NO: 100445 - protein, 4 aa, Artificial Sequence
  Building block peptide "PEP"
  MOD_RES (1)..(3): Xaa is C or S
XKXS

SEQ ID NO: 100446 - protein, 5 aa, Artificial Sequence
  Building block peptide "PEP"
  MOD_RES (2)..(4): Xaa is C or S
KXEXR

SEQ ID NO: 100447 - protein, 5 aa, Artificial Sequence
  Building block peptide "PEP"
  MOD_RES (2)..(4): Xaa is C or S
QXEXR

SEQ ID NO: 100448 - protein, 6 aa, Artificial Sequence
  Building block peptide "PEP"
  MOD_RES (3)..(5): Xaa is C or S
LEXAXA

SEQ ID NO: 100449 - protein, 6 aa, Artificial Sequence
  Building block peptide "PEP"
  MOD_RES (3)..(5): Xaa is C or S
LAXKXE
